United States Patent Application Publication US 2022/0211063 A1 - sequence listing, part 22

SEQ ID NO: 56 - DNA, 7752691 bp, Penicillium roqueforti (residues 3,876,347-5,814,519 of 7,752,691)
  misc_feature (471)..(2988): n is a, c, g, or t
  misc_feature (125072)..(125245): n is a, c, g, or t
  misc_feature (177056)..(177831): n is a, c, g, or t
  misc_feature (384173)..(384363): n is a, c, g, or t
  misc_feature (555910)..(555935): n is a, c, g, or t
  misc_feature (601324)..(601424): n is a, c, g, or t
  misc_feature (676814)..(677158): n is a, c, g, or t
  misc_feature (719555)..(719754): n is a, c, g, or t
  misc_feature (1142719)..(1142936): n is a, c, g, or t
  misc_feature (1186267)..(1186889): n is a, c, g, or t
  misc_feature (1335750)..(1335921): n is a, c, g, or t
  misc_feature (1623850)..(1624038): n is a, c, g, or t
  misc_feature (1638010)..(1638177): n is a, c, g, or t
  misc_feature (1653190)..(1653311): n is a, c, g, or t
  misc_feature (1825514)..(1825694): n is a, c, g, or t
  misc_feature (2226312)..(2226460): n is a, c, g, or t
  misc_feature (2393310)..(2393476): n is a, c, g, or t
  misc_feature (2448029)..(2448167): n is a, c, g, or t
  misc_feature (2535304)..(2535417): n is a, c, g, or t
  misc_feature (2536977)..(2537199): n is a, c, g, or t
  misc_feature (2854098)..(2854136): n is a, c, g, or t
  misc_feature (2984508)..(2984757): n is a, c, g, or t
  misc_feature (3020810)..(3020969): n is a, c, g, or t
  misc_feature (3033643)..(3034020): n is a, c, g, or t
  misc_feature (3159237)..(3159358): n is a, c, g, or t
  misc_feature (3215468)..(3215733): n is a, c, g, or t
  misc_feature (3224528)..(3224830): n is a, c, g, or t
  misc_feature (3317372)..(3317652): n is a, c, g, or t
  misc_feature (3542053)..(3542228): n is a, c, g, or t
  misc_feature (3623060)..(3671559): n is a, c, g, or t
  misc_feature (3674099)..(3676135): n is a, c, g, or t
  misc_feature (3690909)..(3691143): n is a, c, g, or t
  misc_feature (3731654)..(3731912): n is a, c, g, or t
  misc_feature (3988980)..(3989155): n is a, c, g, or t
  misc_feature (3991939)..(3992050): n is a, c, g, or t
  misc_feature (4101299)..(4101736): n is a, c, g, or t
  misc_feature (4338887)..(4339016): n is a, c, g, or t
  misc_feature (4339394)..(4339698): n is a, c, g, or t
  misc_feature (4384061)..(4384223): n is a, c, g, or t
  misc_feature (4533678)..(4533904): n is a, c, g, or t
  misc_feature (4697041)..(4697211): n is a, c, g, or t
  misc_feature (4793826)..(4796541): n is a, c, g, or t
  misc_feature (4802143)..(4802515): n is a, c, g, or t
  misc_feature (5082574)..(5082717): n is a, c, g, or t
  misc_feature (5096756)..(5096912): n is a, c, g, or t
  misc_feature (5239501)..(5239639): n is a, c, g, or t
  misc_feature (5277854)..(5278038): n is a, c, g, or t
  misc_feature (5381189)..(5381388): n is a, c, g, or t
  misc_feature (5479369)..(5479800): n is a, c, g, or t
  misc_feature (5512360)..(5512556): n is a, c, g, or t
  misc_feature (5631285)..(5631372): n is a, c, g, or t
  misc_feature (5721770)..(5721994): n is a, c, g, or t
  misc_feature (5728887)..(5729032): n is a, c, g, or t
  misc_feature (5774080)..(5774169): n is a, c, g, or t
  misc_feature (5808546)..(5808590): n is a, c, g, or t
  misc_feature (5833022)..(5833139): n is a, c, g, or t
  misc_feature (5846579)..(5846770): n is a, c, g, or t
  misc_feature (5859707)..(5864428): n is a, c, g, or t
  misc_feature (5865409)..(5948408): n is a, c, g, or t
  misc_feature (5948989)..(5949423): n is a, c, g, or t
  misc_feature (6008477)..(6008565): n is a, c, g, or t
  misc_feature (6324500)..(6325221): n is a, c, g, or t
  misc_feature (6373350)..(6373710): n is a, c, g, or t
  misc_feature (6805689)..(6805691): n is a, c, g, or t
  misc_feature (6847122)..(6848137): n is a, c, g, or t
  misc_feature (6999671)..(6999803): n is a, c, g, or t
  misc_feature (7043433)..(7047240): n is a, c, g, or t
  misc_feature (7056977)..(7057482): n is a, c, g, or t
  misc_feature (7108384)..(7109155): n is a, c, g, or t
  misc_feature (7114292)..(7114980): n is a, c, g, or t
  misc_feature (7152070)..(7152265): n is a, c, g, or t
  misc_feature (7347420)..(7347526): n is a, c, g, or t
  misc_feature (7355683)..(7355687): n is a, c, g, or t
  misc_feature (7379165)..(7379439): n is a, c, g, or t
  misc_feature (7441586)..(7441811): n is a, c, g, or t
  misc_feature (7524935)..(7525054): n is a, c, g, or t
  misc_feature (7750548)..(7752461): n is a, c, g, or t
gtagcatggttacggcgtagtgtgaactagagatacttcgtgttgattgtagctccactgttcggagtactccgtagttgttattgccacgccaggagtggggttgaaaattgtgtcgacttgcagggtagtacacttcaaccctgtcgatttagacccccttaatatcggaatccttaatgtcggaatcagcacttcgtatgttgtactatatttacaatcttgctggccagaattaattagcttataatagggcacaaaggcctaggcccagaaatgtgaacttgtggaatagggctcactacccacgtgatctgttatattgtccttcactctttctttatttaaataccaaccagtaatatcttgtatcttgtaaagaattaataaaagataccttactttactggacaaccttggaattaaatcaacggggtttgggtcttgactgtgtattggcccgtggatctactggttcaccggctccactctccggggcccgggggccgagcccctgcgcacgctcccctcggtaaatcgggcattgttgtacggagaacttccgtactcagaatctcagcttgaccaacacgcccagactcgagaatctcttcccacagataaagtgcggagtatttcggagatagtttcctttcgaatcaatcaactgcaaaatcaatgattagctcgctcagtaccaggcacaccttgctttggcgggacaagactccttgcatgagaaggatgcatgattgggactgactgtagattgaaaaccccgttgtctgattggcatcttgtcttcttcctctttgccatcactctcactatgacccccctcatacccctcgccctgctcagcctcatctcctacttcatatactaccatgttataaagccctacttcctctctccactctcttccatccccaatgctcacttcacgtcacccatctccagcggctggattgaccgcaagcgcagcacaagcacggaagtcctcgccatctacgccctacaccaaaagcacggccccattgtccgtctcggcccaaaggagctgagtgtcaattctctccaaggtctgaagataatatataccggcgctttcgagaaacatccgttctacaacgatgtcttcgtcaacttcaacaccgaaaatttggtcggcatggtccacaatgcgccgcacgcgcaccaaaagcgcatgctgagcaagatttactccaagtcatatctccaggaatctagtgatctgcgggcgatctcaaaagttgtgctttgggaacgattgatgcctattctcaagaaggtgggggagggtggagaggtggtgaatgtgctgcccctcttccaggctgttggaatggactttacctcctctttcctatttggattgagacacgggacgaggtatttgtttgatattcccgagtggaagttatggttggaagagtatgagcggttcaagtatttgagtcgagacgatcggtttatggggttcattgaggggtggtgcttagggttatgcgcgggggtggaagcatctcaaaagcaggacgtcttcggcgatgaggacaaactgccatccacgaacccagtcgtctacgaccagctgcaccagagcctcctaaaccagaaggaatacgattcgcgtccgttgaacctagtagttgcgtccgaattactggaccacctaattgcaggccacgaaacgtcaggaatcaccttcacgtacatgatgtgggagctatcgcagcatccagaggttgaggccgagctgcgaaaggaacttcttaccttatcgccatccctccaatacccagccacagacggagagaaacccctccccgctccttccgcgatcgacgctctccccctgctggacgctattgtccgcgagactctccgtcttcactccccagccccaacacaactcccccgcgtgaccccaaccacagaaaaaggaacttctctgcacggatacgacagcatcccaggcggtgtgagggtcagctcaacagcctactccctccatcgcatcagcgaggtctacccgcgcccgctggaatggctgcctcgacggtggatcgaggcaggagacaatattcatgacatgaggcggctgttctgggcgttcgggagcggtggacgcatgtgtctggggagtaatttcgcattgcaaggtatgcctcccgagtatgggtttcggagaacacactaatgatgcagaaatcaaattggtcatggcggctgtatattcaaattacacgacgtctattgtcgacgacgagggtattgagcaggaccacgctttcatctcgctgccacgtgggcggaagctgatgttgaggtttatcccggtctatgaatgatgcgatgcagtcatgatgatatcaaaagtaatgaaaagcttttttttaatgctttgaccatgtctcaccaacggtcttgagcacaatgtcgacttctctccgcaatttctgattgatggaggagtagagacatctggatagatcattggcgatgaaaatagtcctctaggaacgagtaactcaccttgcgtacacaactagcgccacctggttgttggtgtcaatatgaatacgctcaatatatatcattggttgtattcagcctttagcttcatattattgtttagttacatattcatgaatcaaaagatcattaaacttggttactgttattatagcattatctttcatatagaacatagtggctaatcgatcctcatgatgattaggcaagctttgattccaaagacctcaacaaactccgagccaccaagaaagccatatcggactttcttcctaggtattgaagcgcacggatcaaaaactcacaattctgccggaagcactcagtatacatcttctgatctgtgggaacatccaagttctctaccaagatatatcccgccttggcaaaacaatgaactagcacagccgtccacggttcgactaggaaggcaacttcactgagagaatcgtggaaatgatggttcatgaacgattcctgcccttgtatcgaagcccgggcaagtccaccaactgccaacgcattattcattctaagcgtagcaaccaaatgtgtagtttgtcgagcttcacgtgcaagatcagagccaagtctgcatttatcaatgctctctagtacgtccgccaaaagcatcgtggcgaggtgccagtggccgtcgaggataacataccacgactgtatgcgagacggaagcagttcatggttggtgacgcaatcaaccatgaaactctggtatgtggaatcccagtgttggcagaccaggagggtcttctggataatattttcaatatgctcgggacttgcgcctcggtagaccatagtttgaagttgtgtcacccgacggtaaaggagcactttgacaggagtcgcctctgaaagtatggatgcggcttcttcgtaggagcatggccacctcggctggatttggctcgatccctgacgttgtattgaagaccgaagaaataaatctccccagacgtcttctttcccgtgggcattgcttggaatattccaggggtcgaaattaatcggatctctgggctctcctattggcgaagttgttgaaatttgactatcctcatccgacactactaaagggcgctgatacattgcagcactcagggtatcaaacataacacctagccaaaacatcagatctagcgtagtgcggtgttcatgactagtcaggagtggatcaagtggaggctccgacggttgtggtattcccagcacattcgccgttgtctggtctatcgggcccctcccaagccctctcattttaggagcagcctcccgctgcagtctcgtgaacttgtgccggaaagtgaaaatttgacggttggcagattccaaaaatattggagcgcgatcattctctaaaagctcccccaagcttgtttcctgtcctttgtccagcggactttgtgtcaaagagaaaattatgttcgcgaaggcgatgcgaaaagacggaatactgctcgaatgctccaaagcgtgccgtgcttcgttccagactttctgtcggatcgacctctcatcattgtcgattgccgaggggaccgacgcaccggtgcccttctgcgcatgttgagcccactgagatgcaaatgacataatcgctagatgaagcgcccgagctgcctttgtatcttcttccgcacttaaagctctgccgcgtattgaggatgatactcgatccaactgacagacccgaatacacatcctgttcgaccaattcggtccccattctttcatgcctcgatcgggaaccacttgactgatcgagtcactgtaaggacagttgtgctctgtcaaccaacatgacaaagcattctccatgctgtcgtggtaaatgcggactaggttgcgcgacattgtcgcccgagcgctttgcttagctgtattttcggacgcgatgcaaaagttccattgcggtggcgtgtttgagcttcggtcagacgcagactcggacggatgtttctgtcgactcggtttccacgttgaaaccgttgatataagatcagaggtgggtgtatattcctgttgtggcaataagctgtatgtgctgccgacagaacttggtgccaaatccaaaagggcgtctgattccgcggagtctggggatccattcggcattgagttattaatttgcaaatcgtatgggatgttcatcgcccatggaaatgattgcgactggtcatcgcttgaattttgggtttggaatgactccataaagtgattttccgggtgtgacgatgatgaggacgaggcgtaatccgaggtttcaggggacccaagcaattcaggcaattctccaagatcggcgggatgcgtttgtgcagagcgcagtatctcctcaagagcttcgtcatgagagcctacgacagatgcttttgcggtgttggttttgattcgttttcgactccctctcgagtccacgcgcttggaggagatccagttgaatgtgcactcctttttccatcgtgtgcagtttgagcaagtactgaatgtgctcttttggcgatctttctaagtataaaagttagcgaccgccgtggatgacacagaaacatgttaacgaacaggtgcgtcgcagcctcttttgcccttgcgacatggatcacagctatgaagctgacgccgacgggagtcttccatgctaagctattgcatgtattattggtgagttatatgtaccggaaagaaggcagatgggtggccccgatatgcggaagaagtacgaaaggggcctccagaccaagatatttcataattcctgggggaacacgtgaactttgcagagtgcggagtgagtttaagtggggtaaaaggtaaaagtgggggagctagggcttgtatccgtccatggctcgacacgagtcatcttcggtccagaggaactgtgattggacattgctcgagtatagaatgcttcaagtagataatatctggtgtgccaggttatagaaacatctgggtctgacgtgtaaagaatccaaggctgtgaacagcactggttgacctcaggttacagcgcaggaggtggcgcattcttgcgatgacgccgatcggccaattgtctcaccgagaccgagccaatcgtataagcccaccgtcacgggatgtggtcacgggctcgcccgcagttactaaaatatcagagattgatcttcaatgtgatcgaccaattgaacgggtaggcagcgtcgtggttgtgattttacatacattaaggggtaagattttccccacagaatgcccgcccaatttatccttattctggtctgatgaaccagctctccaatcaattgatgatgtaatcaattgatatgcttggctgactgggcacggtctacaagaacttttacagtagctacgtccaagaatgatttctgcacattgcactcaatactcaatatgtagagttgattttctatggtatttacaaattggaaccaaacagctattgaaaaccttcccagcgatctgaagctcacgacttttggaggtgaacgcggactgtcttcacctccgtgtagttctccagggcgtatgatcccagctctctgccgatacctgactccttgaaaccaccgaatggcatttggtagtgaagggtgttgtagttgttaacccagacggttctattgcaagatatgttagcgaattcatgaagctcagagactagctttgcttttcaattgactcacccagccttgacagcgttggacactctgatggcagtgttaatgtttgtggtgtggacagctgcggccaagcctattttgatccgttagtcagatcatggaagtcaaatggaatgtaacatctcggagtacttaccgtagtttgtggaattggccactctgatagcctcctcctcggtggagaatttctgcaccgtgcacacaggtccaaagatctcttctttgacaatcgtcatgttctcgtcgacatcagcaaagattgtgggttgaatgtagtatccttcgctgccatgacgatcgccaccagtgacaacagtggcgccagcaccctttccgtccttaatataacccatgatccggtcatattggagctgcgagacttgcggtccctggaaggtctcggaatggaacggatctccgaccttgttctgctctgttcgcttcttgaaaagctctaggaacttgtgatagatgtcttcgtgaacaagaatacgagagcctgcacaacagcactgtccatggttgaagaagatacccagattgacccattcgattgcatcctccaagttcgcatctgggagaatgatgttcggcgacttgccgccgagctcgagagtgactttcttcaagttactatcggctgctgccttcatgatgtgacgtccgaccagagtcgatccagtgaaagcaaccttgtcaatatccatgtgagaggcgattgctgcaccggcagttcttccgaatcctgaaataacattgaccactccaggggggaatccggcttccttgataagcttggcgacatagagcgctgaaaggggagtttgctcggctgtcttgataacaattgtatttccggtggccagagcagggccaattttccaagcgaacatcaagagcgggaagttccatggaataatttggccacagacacccactggctcgtggcgcgtgtaggtcaagctgttgctatcagtgtcgatggtttggccgtaaatcttgtcggaccagccaccatagtaccgcaggcaccctgcggagttatttacatcccctttggccattgtcactgacttgccgttatcaagtgcttcaatagcggccaatgtttcgatgtcgcgttctaggaagtctgcaagacgaagaaggagacgaccacgttcggatggcgtaattgttttccactctccattcagtgcggtacgagcagctttcacggcaatgttgacatcttcctctgcgccttcgtgcacggcgacaataggcttctcgttgtgagggttgattgtctcgaaggttctgccggccacacccttgatgaattcattgttgatgaatcttatggttttgtcagtttcttgcccaggatcattaaggtttgttaaacttacagtcccaaaggttgctcatatgtgagcacgggggtcttaatcgattggaaaagtgccatggttggaaagagaagtcggtggtatagactgaacaggatgtgagatatgggagatgtatgagaattgtgaggaaccataggcacccttatatagctgctggaaaggacccgggtggcgaaaatgatcggggtgggggagcgcggggaaagcatcgcaatcgataaaggccggtccgatgtttttcgctaattgtggggtagcaaaccccctgcctccgtttttggctgtgatgggcacttcctttcgtccggaccgctatcattcgtcgggtgttggaagcgggaaatgaagcaaccccgtcttttggtcctgtgatgaagctctcggtgtgggatacagcggtcccgaatggatcattttttggtaagatcaattatttccagctattcccacctagacaataacacaagtttaacatcttatttgagtaacggcgcatttgcatttattactagtatcatgcttctatatcaaataactttcaatctagcgggctcgtacaaagtgtaaatagttcgcctatcactgatagtcattcacgcaacacaaggcaggtactctattttgtccgcaaccgctcggtccacggctggggcgtccccgttcgataataaacttgataataagctcgtggttcccgaggttgtgtggagactagtcaaatgcaagacatagctctagaagccaaacccaacatcagcgaataatatggcaagtgtatcaacctttgaacgtcattcaaattcagtatctcaatttacaaatcccagaaatccacacctaagtctccactcctatatacagcatattctcagtccataatctgtgcctagagcacaattcaccaatcattatttactccggcatctcaagcacatagcggccggcaatcttgccttgttctgtttcgagttagcttcaagtccaaatagcagtgtgacagtgtgacatacccataagctcgaagatcttagggagatccttcagaggcgccagcttgaatggagccttaatcaagccccgggcgaagaagtcgagagcttcaacaccgtcctgttgattaccaacgtagcttcccttaatagtgatcatacgaacgacagtactaatcactggggccttgaggaatgcatctgggggcaatccgatcgcaacaattgtgcctcgggagcggacatattctgaggcttgttggaaaggcttctccgagacagccaacaagatcacggcatgagcaccaagaccatcgggagttgcggctttcacgtcggcaacaaggtccttggacttggtaaagtcgacataagtctgttttcgactttgttagcgtccatagaatgtcagggcatagagattcatgatcatacctctgtgccaagcttctcacacatctctcgcttctcctcgcctccgtcaatggcgactacgcgtagacccatggcctttgcgtactgctgtgcaagtgacccgaggccaccgcctgctccaacaatagcaactgtctggccgggacgaacgccggattccttcaggcctttataaacggtgataccagcgcagagcactggagctgctgcatcaaggggaacgcccttggggatcttagcagcattggcggcctttccgatggcgtattgctggaaggtaccatcgacagtgtatccagaaagttgcgcgtgagcgcacagaggggtatcagattgtctgcagaattcacactcggcacacgagctgttgatccacttaattccagcgtggtcaccgatctcaaaggtgttcacgagttcacccttggccacgaccactccagctccttcgtggccaccgaccaggggcatcttgacggggatgggccagtggcccatcatcgcatggtaatcggtgtggcaaacgccagagtagcgaatcttgaccagaatctgatcaggaccgggcttaggaacggggatctgtttgaggacaagtggccctccgatcttctcggcgacctgcgcccattgtgtctctgggatggacatattgatgagatgaaaaggttggaatgagttataagtgtgtggaagattgattctttggtgaattgaggattgtttgccgggcctcaattggagctttatagctaaacatgtcgggtggggatgtccggggtagtaaaaggcggggcaggacctgtcgcatcgattctcatgtttcctaccatctgaggcaattagaccgggctaccggaatgtgtcaacgatgacagaccacccggaatactgcaacgcgtagactgattgggattcagtgtgtatgatccaagaacttgaaatgcaggagaggcaatgcggggaaggtttgcggggatcgcgcacggcccgccatgcggagccgcacgggtagctactgcgattggatagatgattctcaccgaaatcctttttgtccgtttccaggaagatctcgggatcacaaatgacgtcgggactattctggcccgaaaatatggatatgcagacggtcggtggcaaatatccaagaagcttggtgcttaaccctcaaggcatcgcaagagatacatctaacatcttttgactaaatcaacgccttgcaatattggccattaggtcatcatgaataatattggtataatcatatttcgaaatttcaatgttgtacacgaaaaaaaaaaaaagaggatggcgagggggaaagtcccagaaagggcaaatctccgagaatccaacacacagggcccatctctctttctcttccagtcataaaattagcagaaccaatttgcgtatattttggttgcgctagtcagaaaccatggggttcttcttcgatcccgtggggaaagaatgtgcttgaccagccactgctgatagcaaatccggaatatggttcctcttttgcatacatatgtatctttgccaagctggttccgaagctgtcatccagagcgaggcatggcgtccccacttcactatcttcagatacgctggatgacctctctgacgacgtcgagtatgccgcatctgagaagaagggcatgaaattgtcatttcctttaaagatagttccgccacaagcttgatttccgaatttgaaactcgattgttcgtcgaaaaaggttgagtcaatgacttcatcaaagacttcttcaaatgggtcgcttctgttgtctgggatatgtctctcatcgctggcttgttgtctagttatctcgttgctataccccatattaataaggatgcaatagtgctgaagtaaagccagactgactcatagcttgtagtattcaagatattctctttttgatgctgggtttgctgcagggaagtaacaccgcgacacgagctagccttggatgctttcttcgtacctccattgaggtatttaggtggttttcgatgtccatcaacacattgtgacggcatcttgcgcttcacgcattgcccacaggggcgttcatttcctaccgcctttgtcagtttattcttctcaaactacccttgttcgagaccacaaggcggggtatccctgagcttaccgcatgttttatgggccttttggcaatacaagcaggatcttctagcctttctgcgggggcgcgggagctcgaattcagtgcgaggtgccatgttcagactagtcatcttcaatttgtgtagtgtgggatcttcaaggaaggtagataagatagtgtcacgtttgtcgatgcgacgaacttggaatcaggctttatatatacctagataaaaggttcttcacgaaggttactaacaccaagggtcctcgcaatatatggccaccaaggtgtttatcaagactacgttcatcgactgccataacaaatttgaaacgtcattctgagcggctccgcatgtttggccatcctacaacatagttctcacaatggtttagctcccttcaccagatgggaatatcggggccgtccttcagtccaaaataatgcggggaaaatcagcaagaaatgcgccgatcgtaatttcagctgtgcggctccgcatggccatttcggaaccgcatggccccgaactcaacgcgtcaaggcttggcaattggcgatgatttcccagtttcaaatccaccaacatactttttggatcatctgatctgcattccccgcaaaaagactagcaaactccttgtcatatttgtggggtcaacccccggacggaagagtttatttggcacagagtttatgtggcaacttggattcagcgaaggtagcgatcatcaaagttaaaaacctggggacatagcacatcgatacacaacattggttgaccccctgtctattttcaccggttattgtgctcactccccgttctggactcatccggtcttgctgaaaatcgagacatcccacattaaccgtctgattggacgcggtggaaaggaatgtgactgtactctccactccccctgttttacagtgaaatgagtgaatatcaattaccccgtggtgcacgtcagctacaaagtccggggaaaggttaaaggttccacagtccccgcaaattaataacaacgaggcttatctttcagagcttccattctcattacctgctatagtatattcttctactctttgaagaaaccagagagagccatgtcacatcccagcgagaacagaatggacagcttcgccagtcaaaatggcgagtcgaaggccactttccaaaacagggagaacacacaaaatgctctcactacagtcccaacgtcagtgactctgtcagcggaacaatttgaaaggctttatttgagtcctatgacggttcgccaatcatcgctagcgaagaaggttggaaatccgacaccattgtgagtctctgaatactatattctacgcacggcaattttgtctgacttgattgaacatgcagagcactaggaggttttgtcattaccaccacacccgtttcatgctgcttgatgggctggagaggagccagtggaaatggagttgctttcatgtgagaaaaccaatggatcgagagagccccatctaatgaactgaacagtggacctatcattttccttggtggtctgttgttgcttatcacgagtattcttgagttcatcatcggaaacacattcccctgtgttgtgtttggcactattggtaagtcttcctatctcatgatacaagcctcgctcactagtccatgttgctgatacttcaccaaggcgggttttggtttgcgtttgcagccacgatgattccagctttcaatgcagccggtcagtttgttcagatatatcattctaccctcatgatatgagtttgctcacacttcatagctccctactcctcgtcaaccaccgatacagctgccgggctagccagcgaaagctttatgaatacctatggtaagggcaaccaagactctcaaatttgaggaatagctctgacgaaaccagcattcctattcataactatggccgttttgatgttcatcttcatgatttgtgcaacacgtatcaatgtggtatacactctcattttcctctcactgctcttggttttccttctgctgtccgcggcctattggcaactaggccaagggaatgcatctgttggtgatcggtgtgtaaaagtgagtatcattctcattatttctctgctattttgactggattctaacccgatctttctcccagggtgctggagcttcgctctttgttgctagtttactcggcttttacctgttgattgttcaactgtttgggtccatagggttcccatgcgttttgccggttggagacttggcagtactttggacccgcaatgaagacaagtgagtctcctaaaaacaatcgaatagttcgttctgacataatacaagagagcgagaggatgttgaacagccaaacgctcgctagagtcgaatcttttacggtttatctaatgttgcttgctggtatgggaagccggctgtgtcggctggctgtctcggatgtgcaagatagcttcaaccttgaaagttcttgaatcagtcagctctatcagccgcagctgttttttgtttcctttgatctcaccaggtaatattttgcgaggcgtaagtgaggcattgttaaaagtcggaggggggtgccgagtcagcttcccaaccctgcgcagattgacttgcgcatacatgtgactacttatcatatatcttagcttgtaaatctaattggtaaaatttttcgtgcattaagaaaaagcagagtactcaaataaaaggatattccgcagatgctccctcgatcagaagcaataccgttgtagtaactcacctcctttcaatcccgataatttcctatttaggaagtgtgaataacctcactatggctacttgctgtcgccgtgaaacctgccgagggagaagggcatgtctcttcataattccgcagggatgttacttggagccaaaactacaatccggtggtgcctgaaaactatatttgccactatttttgcctacaagttaagactcggttctaacatctccgtacaccttgttactccgtacatgtaactatgagccccatgcgggcccatcagtccccacatcgtagatgagtcttcatgactcatccagtcccgcccccggggcctccacaccaatcgacatatagatctcgtcttccagggatcaattaacagcccaaaacaagcttggaaactccaatccgattcccttagtgtaatacactccaaccccttgaactccaattcctcgtgaaaattctgggcgccgtgacactcacaacctcaacctcaaccatgtcaccccccacggcttcaatgaccttctatgacatcgctctagcacctcctgtcacaaaatcctcctgctccccaaatccctggaaaagccgctacgccctgaacttcaaaaatgtcccctacaaaacaacctgggtacccctactcgccatcagctccgtccgcggcgctctcaacatccccgcctcgcgcaaattcgtcgacggatccccctatcaaaccctacctgttctctccgacccagctaccgggcgcacagtgggcgactccttagagatcgcgatatacctacaggaacaatacccgtcgtcgggggcgggagacttattcccggcgcaggcactggagttcgtctttgggcgggatttgggactttacgcgccgattgcagaggcgcaggtcgcggaggggcctgctgctgcgtacgcgaagtttaatacgaatgtcgatgctgtgtttagtgcgcatgcacgcctgatggcgcttggcatgccttttgatccggctgttgcggaggagtgcaaggctatgttctcgaagaggatgggtgtgccgtgggaggctttggcgcttggtggggaggagagggaggagttgttgaggtcgtttgaggagactttgggtggacttgcgaagttgtatacgaatgatgcgagtgggccgttcctgatgggaggcaaagcaaactatgcggatttcattgttggggggtggttgcgcatgagtcggggtatgttgccggtggaggagtgggaagcgttgaagggatggcatggcggtgtattcggaaggttacatgaggcgctggaagtgtttgcgcagatggactagatctggataaatggctgggtggtggatgatggatggcgttgtatactacgtattcggcccgatgcacggtttcagaaccttcataattatatacatatacatgagatatctgatagtatgtatggagtactccgtagtggtagttgagatgttgcccagacatgtgttaggcaaattctcacgtgatgtatcatgtgacatagggggttacataagactatttaattgggcgccaaaggataaggacaaacatagcgtctattgctcattgcagcggtatatatcaggccgtaacattcgttagagtaacattccctaggggccacactagaagtggtttcagcaccgaaaaacgaacggaaaagtgttccttgacgcgatctttggtctttaatccatttggccacgaagcctcctttttgtgctaccatggatcgcagaatatcaccatcagacttgaccgactcaaaccgtctcgtggaagataccatgatccatgtatttcgtgtggataacacgacggtagtaaaattatgcgacccaagtcgcctcgccgaggcagaagccatgaggttcatccgctctaaaacttccattccggttccagaggtttataacgcttatgtcgatgaaaccattggccgtggggtcattgttatggagtacattgaaggggaggttcttcgcgatgttattgaggatatggatgacacacggcgccaaaagattatctcggaattgcgaaagttcatgtccgagctacgatcaattgaaggcaattttatcggctctattgatggctcagcttgtgaggatcctgtcttttgtgccgaacagggtgggtttggcccatataaaacggagaacgaattcaatgaggggttaatctgggcaatgaccatcaaccagacgacgaactcctggattaagcatgttgcaaaactcattcgagccatgccatctcatacaacagtgctcaccgacgcggacttttctccgcgaaacatcattatcagtggtgagcgggttgttggaatactcgattgggagatggccggattttatcctgagtactgggaatatatcaaggctatgtatcacccggactggcaaagtcgttggatcgaggatgacattgtggacactgtactgaaaccattttatctcgagcatgctgtcatgttacatatgcaacaggttgtctggtgacgacttctcaaaactcgcttcaagatttagtctatctaccgacaaagaaaattgggaatattttgattgttggtaaatcccgaatgtaagtaaatgcatatctcagtcagaaacaatatatctcgcagagtcagagtagaaacagaacctcactaaaagcaaaaggaaaacgagtaaaaatgaacggaaatatgtaatcaattaccgaaaagaatagattttgaaagtgaaaagagcaaaaaccaaaagtcctattttagttgcatggctcgtatggagtaaattttcctgcatggaatgcgaaacgttccaaccttccaaggatgtgagacttggtagagccgcaaccgtggacccacccatggatgggcggcggctcgggagattagctcatccaaaatagccgctagggccacagagagccggcggaccgtgcttagtgttcttcgcgtaatggtaattcaggtattaaatccccaccgcccgggcccaccagggcttggacctccccttgttaattgaatacataactattgagcgccgtgtggtcttccatatttctccttgtcaatataagcttaatgtctcgaaaaccgtatcccaccccattggttgtccagccactgagtggagagcacacacatactatcatctcgcttcatggaagaggcagtaacgctgagcgttttggtcgtgagctccttgtgtcggcaaacctacaaggccgacttcctacagtaaaatttgtctttcccactgcccgcaagcggcggtcaactatactcaagaagatcccaattcatcagtggtacgataactactcccttgaagaccctggacaaagaaccgaccttcaggtggatgggctctctcagactgctgagttcattcgcggcttagtcaccgaagaggtacggattttaggcgaggcgaatcattcaaagattatcctatgggggctgagtcaaggctgtgctgcgggtatcttcgcgcttttaggtggctggcccgacactagtgaaggaaatacactcggggcatttattgggatgagtggatggctgccatttgagcagcaactatgcgagattatccgatccgacgtcaacctagtattggcggaagacaattatcaggagatgcaatcggaagacgactcatccgaggaatgtgaaagtgatgaagagttagaagcagatgtatattccgaacaagacttcagcgacaatccattggacgagagcagcccggtacacgatgactccaatcccttcaaggggctcaaggaagacagcccactgtgtggtgacttcaatccattcgaggaggacgaggaagaagctccgttggtcatccaggctatcaaccacgttcgtgacatccttgctcttcctatgattccaaacaatactcagtcatcggaagacggtgattcaacaagtttgtgtcacctccacactcctgtctttctgggccacggcgcacaagatcctaaagtctctgcgcgttttggtgaaaagatgtctcgtatgctgtcagatagtctaggaatggatgtgacatggaaggaatatcaagggctagggcattggtaccgtgttgaggacgagattgaagatattttgggctttcttcgggatcgtgtcaacctaccagtgataccagagtcatccctagagaaacagaaaggacaggagaagcaattatgagttctttgaattagatacgccaggcgacggattttaaaccgatgattaagtattccgtaaaaaccctcgtactaggttcggaaaggacatgtgctcagaagaagtctgatgctcagtcaaagatcagctctagatacagaccaaattgagccaaagagagaaaccaaaggagtgggagaggagggaactatgatatagcctgaaaaagatcgtaatttctgtattgctgagagacagatgagagtcctttaaactattcaaagcaccaaactccaaactcccctatttactaagatactaattatcataatcactatgctgagagttcttccaatttctcagctatctgctcaacgtcaaggtcacttggccttatttcaatagcctgaacttcagccttgttgtcctctgacttggagatatctttctctccctccttctccttcgcgatgtctatatgggacagcgtatactcatctggatcccaagccagagctctgcttctcatctctttaaccttttttgccacaagtagttccatctcatctttctccgtgtcacttaagagatcaagtctctgcctccacgcatcctcgacattgtccgccggtccaaagaagcgctgatcgatcttttcccaatataccacatcaatggcacgggtggtcctcgcggcatatgcaatccaaaagtcaccactctcccaaatttctcgcattggaccgagagtcgatcttcttctttcgtagccgtagcgttctcacgatcgatcatcaccttcaaaaatgtctggagccggcgatcgaacacgtttgttcagtcctcaagaccttgaggccagtactccggtgtttcaataagaagccaccaaggcggcgcgtacgtgaactcccaatccacgacgccggtcactttagagtcattgttgacaagaacattagttggtcggaaatcatcacaccatattttgaacgggcctgtatcgaatgctacccatcgcttggtgagcttaccctcgcgggctagcttgcggaagaggtatctgccaatgaacttgcgtcgacgatcatctgcagactcgattgcgtcgtttctttgatggatgagattggcaatgtgaagttccgccagggcttcgaagtacgaagatgctgaggtaaatattgtctcgtagcttggtaattctgactgaggtagggaccctggtctaacgagttcgtttgaattcattgataaaggaaggctcgccacttcccatgtaaagtcgtcaacccgactcaatgatccgatccgagggaagtgtacttttgaaagttgcaacagaatgccagctagctccccgtataatgcttgaagagtgtcctcattgatatcggggttaagccttccccttttctcaggtgggtaatttgggatattgagaaggtcgtacatattcgtgtcatgttcgacatattccatggtaatgaaagggcccaactccaagggagactctttcttagaaccgcagtggagaatgaatggcaccgggattgaagtcgcatcatgaaggtatcgcataatgacaacctcgttccgaacctgttcttcgggaaacatagccgcaccgggtaggggaaagcgtatggtggcggcaacacctgttttgtacgacctccagaatgcgatattgtatgtaccctttcccaagagagaaaatcgaaaagggtcggttcagcgtgatatgatgatttccaatggaatgaaagacctgcttagctccttccataacatgtatgtgacggaagatatgatggttccttttctttgtcctgcagatcagcatgcagttcattatgagcagctttggtcgactttgccctctatcgagcaacctaacctcggatggaaacaggtgcatgtactacctgacactgggacaaacgtttgaagaagctattgatgtcgattgtgcgcctaaatctgtatggcgctggggttatgccatatttgatgacgaaagattgagggcatggaaagcggtttgggccacgagcccgaatttgcagtttcaattattcattttgttgtttgaatgttgactagaggtagttcatttatagtccaataccatctcatgctctaaattaagataccatcatataggctgcgtcatttagctatgagttgaacgtatcgatcagaggattcgacgtaggagccacatcatcctgcgtggcttggactattaaaagtctgaaagaaagttatagaaattataaaagcagatatgatgatcaagggataaagaggcacagctagagaagcactaggtaaggataagcaggtgtgaacaaaggaatccgaatccttggatatatacctgcgcaatatttgaatacaaagaattctcgaaaggaagtatgagttgaagagaatggcctcgctacatgaaacgactctgttcagaaattgcgggctttgatgctgctattcttgttgtcaatgaagcaattcccaatctattattggaacacgttcattgaaaacaaaaaccaccaatacctttcaccagactcattattggcattcaactcttgcttctacatcaatggtatgtggcatgtaaaaagaatcatattcgacaagcaagtccctcataatacctggcttcactcagcatatttcgcatcactcgacttcgacattaatccgccaccaattccaaataaagctacttttattttttgacgctataatctacatctacggagaatttcctgacagcgtctaacagcggtgattatggatcatctttcacggctttccaaacgcattcggggaatcgccaaggcagttgtttcgttctcatcatcaatcgtggatcatatcacactgaagcgacggtgtgaaaatgaagattctgatgaaggggatgatgatgattcggattccatcgacattgatccattcgaagcagtattggaaagagtgaaagcgaagcgtattcgtgaatacgtgacaacgattcgcgcgaagactctttcaaacgataagaagaaaattcctaacgttgaggttaagtctcctactttcataggggagcacatttgctatagggtgaagtttgccgacggagttagctggattctcaaagtcccagctatcggaacccctgatcaatttgacaaagacgatgccgagacccttcgctcggaagcattgacgatgatcatgctgcggcgcgagacaaccataccaatccccgaggtcatttcatacaacattacatgcacaaacaagctcaaagttcccttcattctcatggagttcatcgacgctcggcctttggacgaagtctggcatgaccgggaatctccgaaagaagttgtacaggctcggcgtacacgctgtctgcgggatattgctgcagcgtatatccagcttggaaaatacactttcaacgaagataggcccctgcgatttgacgacgaagattgccttataggtgttgtacccgtgaacaacgacccattctcgggcctcagagagggttgtacttctcgtctggacagatgggggaacgaggaggttgagcatcgaaaggggttgcagaagcttcttcggatgtttgtcgactggactccagagccaaatggtgggaaatcattcgttttgtcacatccaaaccccaatattttcaacttccttgtctcggaagatggttctgtgcgggcaatcctcgattggcacggcgcgcataccagttcgccgagtatagggaatgagtcgtatccactatggctgatgcgcgactgggacccgagcgtatatatatggagtgaagagatggaacaggggattcatgacgaggaaaatgtttgggaagactcaccggacacactgaagttctatcaaaatgtctatgcgcaatgtatcgcagatctgcgaccagaaagcgagaatgccaaagtgacccgaaattccgttctctttcaacatttgatgatggcgacgggagacccgatgtttagcttaggcattaccgaaaagatccttctcgaagtcatgaagcgagtggataagaatagcaataacaaagacagcggaaactcgggttcttccaaagagcatttgacgggcgatcacagttcaccgaatgagacagaggacgcgggccatggtggtattgaagcggacatggatggagaagatgaagacgaattttttgatatttatgaatttctccagggtttgagcaaagacggcctatgtgagcaccgacagaagcttttcaagaaggggtttcaggctttatttattagttagcttcgaggttgcggtgtttgatgtatagttatgcacgatgacttcaaagaccgaagttgtcatgcattattgttgattttgatgttgaaaaggaggacaatttgaaatcagataaactctttttctttcctttgttcctagacactcttgtctcttctctagagtctagttgcacccaaaatgatatgcggttggtacaagagacacctcaggcaggaactggttatccagccacattatgtaatcaagcacgtcagccaatgaaaacatgcacactaaccgatcaagggcttagggctcacctcagtcacaccccactgccttttcgcacttgagcggcttctggacgtcgccctcttcctttgaacatccacctcatccgacaaaatggtgagttccccagcatcccaatatacaactcggaagacagaatactaatcgaaatgtgacgaacaggcgcccgcagcaacaggaggcaagaagcaaaagaagaagtggtccaagggcaagggtacgcaatcaccaaccatgcgatcgtgacgatttcggccgagttcccacaagacacgaacgaaatcgttggacgagctggggatacgcaatagcaccaagaagcaacatttactgacatgtctttcgccctacagtcaaggacaaggcccagcacgccgtcgttctcgacaaggccaccaacgacaagcttcagaaggatgtccagtcctaccgtctgatcactgtcgccacccttgtcgatcgtctcaagatcaacggcagccttgcccgccaggctctcgccgaccttgaggctaacggccagatcaagaaggtcgttggtcactccagcctgagcatctacagtacgttattcaacaccccttatccttcgaaattccaatgctgataaccttcttcaatagcccgtgccgtcaccgccgagtaaacgtctcgtctctcgtcttttctcgcggttttcttttccttgctacgaatgatatcatttaccttgggaagcccggctgggcatgatgcatagtggattaacgtctgactcttgaagggtgtggaacattcgcactcctgatatacgtcagtagtgcgaactgaatcaaaaaatctacaaaacttcatgaaaaggacatgcgtcatattccgtagacttctctcggcctctaccacctacaatttgcactatctacaccgacccagcaaaaacagtaatcctacgactcttccaccatcgcactcctcttcggtcgctgctgctgcgcgctctcacagagcggcaacggctctccatcaacacctccatcctcaaccaccctcccagcctcaaaatactttgcatggttcgcaaagaatccagtccaccgcttgacagtctcctcaacccgcgctctagcagcccgtaactccttctcacgacggattttcctctctgcagaagtcacagcctcattctcgacatcctcaaccggcatgaacataatctcgacaccgcgcaagtcgttcgtaagatcttccttaaagcagcccgtgacaaaagctcgcgttgcgtcccgccccgcaaagaagttgtagctcccaccgggtccgtagatcatgcgattttccgagacgtcgaagacggtcccgttcaccgcgacgtacagggggagactggtgtccgtgccgttgtagagggatagttggcttggtgtcaggataacggggccttgctttattgtagaaatggatgtgttagcttgaatcaacatgaccttttcatttttttgtaaaccaaggaccgggattcgcgtaccacccactgcttcaccaccggccaccgtgtataccatggcctgtacccccacagcacggactcggaggaagtcacataatatgagagaccaccgcaggcgacgagtagggtcacaatcacgcggagtatgtctagcaggcttatgccgtggtcttggctggcttcgtcgtttatggagtgctgtccggaggtcggctctttgtcgggcccattgctggactttgacgtggctgttggtcgctggcggagttctgtcatctctcctgaatttgagttgagttgtaagatcagacaatgaccatttggattgttgtcattggagttgcacaggtggagggcttggctgacaaaacccgaggcaagtgcccagctccgagtggacttcgacttatccacaacttcacatttacaggatttggtttgattttgatcgaatatgttttatttcgcaagctgcattcgtcgctaaagatacaagaggcttgaattcatcacgcaacggagaattacacccagctttttggttcgaacgtcaagtttgcctcgatttatttcccgtcatttgcttacagctgcagattccccttcttgggccgtagacccttcttcccagctacgcgagaagacttcgttcagagcgtcttggaaagtacggcagttcatgtcaatcagacctcgcttgtccttggcttcgggattgcgaatcaccgagactagacagaggtatctgtagaatcaagtcagtatagacaataaagatacactttgagagacatacttgttcatctccatcaaatggatcatagtctgatcatgcaacaccacatggctttctgcttcttggatctggtcgcccaatcgtttacgaactgggtgatcccaagagtacaactctgagatgtcgacaatcacgtcaatataatcagagcacatctcatagcaagccatgtcaacaggtcgagtgtcggaggcgatataaatcttactcagaacatcgaagaggtatgtcttttcaaacccacaattgttggcgagggtgttgatgaggttctcaagtgtagataagttggggatcagcttctggatcactttgctgaaggcttcgaagactgagtaatcgtagatagaggtcaggtagtagtgcacgggcgcattctcgtatccagcgtcactgagctcatcggagatgcgctgcacaatgtcctggaacgtgtcggtgcggtactcgtctgacagtccatcgaccttgtgtatgaagacctcgatgttgatcccgggatagaactgctgaacggtcaatatggttcggttgagccgtgccactgagtccaggtagtcatcttgtgcgtcgatcacccaaaccagggcgcccagactgccgaagatatcttcgaggtcaaaagcggactcaaagtattcgagctgacctgggaaatcccagacttggaagtccatgaaagagctgcaaactccaggtcagcggaaagcgcatcaagcacgtctattctttcgaacttactggatcgagtccttctgaatccgggtagtcgactccaagaagagtgtctcatttggcggcatcttatggaataccacactagcaatagatgacttaccactcctagtacacagttagtatctcagttgtgcgagggctagcagagaagacttgccgtcggagtcccattagaagaagacgaggtttaacatcagggcctttggtattaggcacagaggccgatttggcctgagttggcgcagccacttgtctgcttccctgtaaaatatccagaaggcttagctcagcttcagtcttgggcaatggaatttcacgccgtcgcttccaaaaattgagctcacgtcctataaaaggaccatgaggccggctcacgcgggctgccggtgagtcggacatttaatcaaacaaaaggggtatacattttgggagaatggggaagcaagagaaagcttatggttatagggacgggagattcatgattaggggcagggtggaataaatcaacgcatcacatgttggaaaggaaaagggcattgggcagtcagcgaacccaaccaggctagtatccttggaataacaaggaaaagcccgaggctgaggacggagacaaaatgggactatcttgcaacgggcccattataacaggaaccgtgacagacgctccaaatttggaaatccgtgccttgcctttttcagggcacatttggccgcctagacaggtctctagtgattcttccggaaatagcccaagggtccgggaccaagcagctgtctcacaacggcccgtgcatggatgcagcgggacgcggtaactagccgagcttcgccggatgacctagccggggttcgatgtattatagggaatatggtgcgaggggatgtgctttgggggaaagagtttcttacctccattgaagacagatatctggatatggtatgttagaatctgggatatgcattcagaattgattgggtgtacttacggcgcaatttatttgtattgtgcagggataattagaccaacacaaggtcaaatgtcctccgtgatcacaaagaagaatggtaaaagggactagtcgagctcaatttaaggcaaagaccgactgttgacatctgcatgtgcgaatctcgcctgggaatgccgcaaggatcccagttattgactgggatggtggtacggagtcggatatctgcagtcagacctgtatcatcttcccaaggttgggaaattcaattcacggcgggagggtcggctggagcaatcgtcgagtaaccgttatgccgtttgaggagtgcgggggttggagtagctcggagctccgaggcaaggcgtagcgcgatctggcaccgacgtgcaacactcaaaccagcgcggtaggggagctaaaagagtttattttggaaaatgtaaggcttgaattgattcaaaggagtactcatgagattgtgttaaggaagagatgggggaagaggaagagcagaaccgacattcaagacggatcgttatctctgagcttctatcttatcagttctaatctgtcacagaccgcctttactattctgccacatgccacaatcaacttcataactgtcaaagaaaggtacagagtacacgcctctaacctcatttattacgcttggtcaaggctaaaaatgatgggcttcttcgacatgatattttatgcttaaatacattgatagaattgaacagaaatcactttttttatcatcaacaatcatcaacctcgacatcatgcggcaaccatccggtggttgtgtccatgagcatgtttagtcccttttttctgacccagatactcgctgatacgatgcttgccctgctccggctcctgctcttcttcttcctcttcctcttcctcgacctcaaatgcaggccattcctcccaaccatcttcccacatctttgctaacttatctgttttctcgtctctgctcattttcttgttcttcatcaccttctcccacttcttcatatctttatcatctagaagacactcatccagcagagcagtgatcttgccagtgtcaataccttcaccaatgaacactatttcctggcgacggtcgccccaggcaccttggaaatcattttggatggattcccgcacatccttgtcttctggccaagcctcatcggggagttcagcaaaccaaggcccaccgcatccaagagtcagcataccacctgcttggctccattctccaaattgccagggtctggttgtgagccagaagaagcccttggagcggagaactggaccaaaggccgggtggttacgcttattgctcataatgaccgctggatcaggctggtcaaagtcttccactgacccggagtcggagtctgtatccattgcatcttcttcctcttcttcttcgtcttcctccccgtcttcctcgtcgccttcttcttcttcaacttcattgttctggagaatgatgaacttgtcatggagaagagcaaagaggcggcgtgaatggaagggtcgacgggcagtgtagacgaagttgttgataccgtacctgtaatcgatcagtaaatgattcatgaataaagaactgacaaacttactccaaggtctctggctttggtgccaaccgctcaccattgcctgttgtctgtatcgtcatttcgtgcagactctgcagccacccaggaccagaagcagcacgcacgaaatcaaatttgtttgtgttgataatttcccggacgtctatttgggagtagtttgactcgaggatctttgcgactgggttcagcagcttgagcaaatgcatgagcttatcgcgggttgcttggtcaactgtctcgaccttattgagaatcaacacatcggcgaactcaatttgatccaccatcagatcagatatagtgcgctcatcctcggggacaatctcttccctcccatagcggtcagagaggaactctgctgtgtcgaagctggaaagcaagttgaaggcatcaataacagtgacggtagtgtctaaccgagccattgtgtgcaagccacctaggttcacactatgttgtcaaaacatgtcagcaagcccatcataagcggagatgtggtgaagaaacaatacatttcatccaggatctttcttgcttcctcatcatcattcgcaatctgatcttcagcttccaacatggccgagctaaactccgacgtgaaagtctcagccacttgcataggctcgctaatgccagtcgactcaatgatgacatagtcaacctcatttcgcttggtcagagctgccagttcagccagcaagtctccccgcagagtgcagcagatgcatccgttttgaagtcgaataagcttctcggtggtttgtgagactttgtggttttggatgagggtagcgtcgatgttcagcctaatggaacgaagcaattagcttgcatcctatattcttcgttcgatgtggaactcactggctcatgtcgttgacgatgacagcgatccttaacccatggtcaggagacttgaggatgtgtttgaggagtgtcgtcttgccgcttccctacacatggatgtcagtgtccatggacatgagtcaacgttcatacaactgctgtttcataccaggaatcccgaaagcaaggtcacgggcatctgccgtgtcttcggcttttcctccagcggagctgggacattgtaggagaccgagtctgttccagaattgatgaccatcgtgaaggtgagtgacttttatggctatgtatacaaagcaagaaagaagaaagagaaggaaaaatcaactgagtctctggaagttctatggtatcacattatatagcatctcctttcccacggcaccgtctccaagttcctcaccctctcccactgtcggttgcattttcgatgtcgtacaattgtcaatacatgtcctccaaggttgaagtataccagtggagctatctctcaaccaatgaagcgtatgatttcaaatggcgatgataattgctgtgttttaagtggccagcataaatcgcccgcaaggtacctggctggcgccgctgactttcacggtccccatttgacgagattcgttttgaaaagacagtattagggcatctgtgattggtcttttgctggtttctgggctgagtgctcgttttgaactatcgatggtggatgtacggagtagggctaaacgagctaactaggatagagctagaacgacatatttgaatctctaactagcccaaataaaaggatattgacagtataaagcttgaatgttcttcccccatatgattcttaatatcaattaatgcttcagatataacacactcagatctccaaccttctccaaatcgaaatcggcgatcggctcaatgcgcgggccgataacagccaaatcgccgatctgagaatgcgaaattgacgtcgaagaacgtataaaaggagagtcacaccgacagaatggaaaataacattcattatctctattcctcctctccaaaatgaccgacctgggaatctacaccaaacccctagcctacctaggcctcttcaccctaggaaaagccgccttctccctaacccgccaagcaacaaacttcctcctccccagcacgctctgcaaacgctacaactccacaaaagcaaactgggccctcgtcaccggcgccacagacggaatagggtttggcttcagtcaggagctctgcgcgcgcggcttcaacgtcatcctacacggccggaatgtggagaaactcgaccgtcgccgccgcgaactacaggcgctgttccccgcagtctctgttgctgttctcgtgcgcgatgcgcagaatctgactcccgatattgacgatgttgacgcggaggtgcgcgagatcattcatagcagtaatgcgacgatcggttccccgggtgaccctggcaagttgaccgttcttattaataatgtcggtggtgagatgagaccatctacgctccttaaggagtatacctttgaggatgtgcaggcgaccgtttcgcggaatgcgaccttcgctattcagattacccgtgtgctggcggaacagctggaagagaatgcgccaggtcttgttatgaatgtttcttctgttgcggcgtttggattgccgtatatcagtgcttatagctctacgaagggatttgtggattcctttacgaagtcgctgcgcgcggagttcgccgctgaagggaaggaggttgaggttatggggctgcgggttgccgaggtcaaaactgctgggtatgatgtgaagagtagcttgtttgtccctgaggcgagagtgctggcggctgctggcttggatcgggttgggtgtgggcaagagattgtatgggcctatttctggcattggttgcagggcttgtcgtttgagtatttaccgcgctggatgttgatgaagattgctgcgatgaagctgaaggcaatcagagctgatcagggggccaaggcgaagagcagctgatatggtagctgatatgttgtgcctctggctctctacttcctttctatcacaaacatattgaacagtataagatacacgggaaaatattatatctgtaatcaaacacaacagcaactacagtctatagaatgtctagaagccggccggggccttatgacgatcgtctggaccgtggagtcctgcgccaaggtccaccatgcactcgctttgccaatcctttggtgtgaacttatcgacaattgccttgaaggcgtccaaagtgcagaatgtctcatcgccaggcaagtggttctcaggcttagcagcacagccggggataaggacgggctggtcattgtagcgaatacggacatagtgcttctggagagactcgcgagcgctttcggggagggattcgagaggtgcgcgtgcagtatcggagggggtgggtagcttcggtgcggacttaccgagcaactgggaaaggataccaggcttcttgtttgcgacgggtgggttggagaactcctcgagcacgatgccagcgatggaatcggagctgggcgcttgggagaagagctcgactgcaacagaggaagtgaatggaggccatgactgattttggaatccgccaatactggacaggatggctgccaaggtggtgtcgtggcagccgctcatagcaaacttgatagccttgccagtttccgccttgcctgacccggacgcagcggactcactgcgccagccaccttccacagcggtgctgaccatgcggtcaaccacatcacccatgagagcaccaattcccagtttgcggtattcgctgctctcgccgtagccagcaaaccactcctcaaccgcaatgcggtccacgacggcacgagccttcttgtcgtagaactcggatgggagcttagtggccgggccatgggcatcggttgcgttgatggtatccatgattccggaaagacgagggtgggcatcgacagcaaccttaggcgattcttcgggcatatactttgaccaaaggctgttcaagtacgccatttgttccgagtcgttccctgcattcaaatcattagccgtgatccttatcttcatatcccactgataaacccatacatcgtgtagccgcgcggtcagcaaacagccgtgacagctgtcggaatcgcctacaattcccctcgttcgggaagagtgtctcctcattgacctgacgggccacaatcactggcggtgggaagtcaagcgtgcgcgcgctagccgggtacattccccaaaaggcctcttggagcgactccagcgcacgggggatcggcgtggcgcgcagatacatatcctcggaatcggccttgatctgaggcataaacccgagctggtccacgtataaacgacgcagccgttgtccgagcgcatatgtcgtttcacggcccttgtctgtgagctcgccgtgcaagcttcagatcggacaatttagctttactccacatacagatcatagctccaggaacttaccacatggcttcgacgggtcctcccggtcctgcagtaatcaccgactggtcatttctgccgaatgactccattttccggcgccattggaacccattccattccgagaggtctttgctgctcgatgccatctgcaccatgcgtcttgcgacaccacaatatggccagtcttgtcggggtaactgtcagcatgtactccgccgatatcggtattaggaaattagcatacatgggcttaggcctgtctttgggaagtgttagcggagaccgtcggagagcggatttggggtagtcaattgcggcatacgtttgagaatcgagacgagacaggtgtccgttcacctaggatcggttagaaatgctctcaggggtaacattgtaaatgtatatctcaccatgacggaggaactgtagtagttagctatgtttgtcaatgtggggaccaaaacacgtaccacttgcaccagctgcagcttcagggctggtgggtacaggcgagcgagctcatcctgagtataaggctcacgaggaatgagggtggtcatctcgaatcaagtggaagagagatatccagagagatctaagaatctataaaataaatttaagtcaggaaataaacggcccccaatgaaggcggtgagggagcagctgttggagtaggctataccgataagccatccatgttgacgttcattgaattatactctgtgcatttattaaatagaaaatagaagcattaagtgcggagatttattctaattatattcatcagcctctaaacatggggaaggctaggaaaagctggcaagctcctaaggatataagacccgacatatggtctccgcatctcggcaagttcgccgaagcgtactcgcctcggactagtaatctccgaggtgaagaaaagaagaaaactcttccaagctatgcatatttgacatggtataaaagtacatttaggaacaacattcctcgtggtcactcgtctcccacccctcctcgctttcactggcactccagacagatcgagtgggcaccgccgccgggacatcgctagtctcagtcaatgcagccgcagctgccgcagccgtagcagtagccatttgcttagccaacttcttattattcttcgccttgcgggcattctcctcttcctggcgcatcagtttcacgcgctcggattcctcgttcgccgctcgctccaagagctcgaccagcttctccaacgctggcgcatatgcctgcgcaagggcgaagtccccgaccttgatacgcatgaagtccatcgctcccgcgacggggccggtatagacgccgagcctttggcttgatgtcgtcatgttgatgtcgtcggacattggggcgtcgttgcccgctgattcatcctgggggtcgtcgaatgggatatccgcatctgcgggctcctttgcagctgcatcccggttattcgggaatttgcctggattttgcttctctacaaacgctatcttctggtagcgttggctgaaatgagtgagcaggacagcgcgcgcttgcatgcggcggccaatttcgattgcctcggaggaggtcgagtgccgtttggccctagccgatccgaccatgtcgggttggaaggtggcctcatggataagcacggtcgaaccctgtccaatggcggcaaatttatctgatggcctgcagtcaccggagtaggaaaccttgaatccatttgagaagacaagagagacggcgagcgcacccttgcagtgtttgacacggcaagtgagtatgtctgcaaggccggtggcagacttgagaagaggagtgatgggggaggattcgtccgtgaaatcaacatgaagacgatgacgattaggtagttggtgtgagaactcggtggtgattttagaaccttgtacttcgggatgcgcggaaagagtaagcaacttgtcgaacccgaagttctcgacctgtgagtattcttccaaccaggatatcattgcatcatcagacacaagtgccagccgtttctcctggaggatcttggctatgtcgttttcacgtctagcagccgagccaaatccatccttgaagttctctgcgtgccaggccttgatcacagagaccgttcctaggtggtgatcagcgtgcaagtggctgatccaaatcattcgcaggttctgaagcacttcacgaagttcttcgggctcgaaaactcgcttcagttgaccaagagtattctcaccacagtcaagcagatagtagccatatccaggcacctttagcagtgtggcagagacatttcggtatttagatggaacagaagaaccagtacccagggcgatgatttctgcatccgctccaggccattgtgtccgttgctcgtgcaactttttctggaaagcaggtttagccacgcggctgctaatgacttccattctttgtgtaacagaacgcgggatgctattcaatacattcgctgggttgaagcgggtcatcacatcctcactgttgaacccgaaattgggctccatgttgatgatgaatccgggttcaagaggctgcagtggagaattctggcgagcagcaattgcagattgtgaattggcattaggtgagcccggttggggaagggtcacattgtcgtgaacaggaaccgcatagctatcgcttttcagacgggcgaggcgaacagtcgagctagcagagcaggtcaatgccaggtagttcgggcagtggtctgtgctcgacacggtgtgcttgcagtgggacatgctggcaacgaattcctggaatttaggattctcagccacgcctggtccaagaatccagatgaaggcctgcaactcggtcgtcacggctggtgacttccattcgggccggttgaccaggtcctcgacgtaatcagacgatggcaattccatgatggcaacgccttttcctgctcgcgtctgtcccaagaccatatctggagtgatagtcttgccatctagggattgaacgctctcgcccttcgtcaaagccgcgtacttagaacccttctcaacgttcaattctcgggccttcttcgggtcgaactttccgcggatatcgtggtttcgcacgatatagcagacagcctctttcgagggagaagtggttgggagactctcgatagtagcaccgggccagggctttcgaacgagcaccttgatgtctggcagctcatctgagccacccggcaccggacctttgtattgttcaaggtccttggtttctgggttgcgaatgaatatggcggccggcatcttgacctcagccaatggggtttcatggagggcatccatcttccacgttgagttaaacatatcctgcacaatagactgcgtcaccatcaagttcttagtacgttggtccatatgatctccggtctgttcagattcctggaactcgtccaagctccgctttcgtggactctgtgacaacggctgcgtaactggagaacgcgccgatgggtgaggtttaataggcagggcccagactttgatgttactgtcggaccatgatggcttctcaaagggatcctcggcgccgataggcatttgcttagcgagggtttccgagtcatattctttcaaatacaccggcatgccctttcggaaaacaaaccgtcgagacgtagcaagtgtgtgtgtaagattcgcagcaccatgaatggtgaggttacctcgctgcgagaccgtctcgccgtcccgctccacaagggcaggggcaggggtcctaccattttggggtgcacggggcttagattttgtattttcttcggcctcccgttccgccctgcgggcagccttctttctttgttcgtcctcaatagccgccatggaagatgccaccgtatcagcaagggtcagaacaatcccaatcaaaccgcctgtgttggcccattccgtccgtccagtgacaaagacatcggtgagaagagatagcttgatcccgcgctctgtgcatgcacgctgtgtgccttctgatacctggccgaagaagtatcgcttgtctgggaagttgaggcaaacggccgtgccgggggtatcggccgttggggtcgtgatgacctgatagaagaatttcatcggggcaattccttctaccggtataggcaatggaacgagttcgagtttggatggttcacaaatcaagtagtcgtcgttatcgggccgtcgtctgttcaaggccggggcttgaagaaagtatgcgttcgttttgattgcaggttgtctgatccgaagcggcaaggcttgctcttgcaatttctttttttccgctaattgctccaatgatttagggaaagggatggggctactggagctcggctttgagtcaccgggttttggtgagtcacggcttctagcgctgcgatacgatcgtagggtgaatggcgaaattgaggttcgagagaatgcgcgccaggcgactgcgcgagtggtcgcggttgacaggacaccgcgcacgcaagaggaagccaacttggctagaatgaggggtatcgaaatagaaatttatgataaaaggcgcgcatgtgtagtgatgtcaaggagtaggaaattggtggattccaacgtttagagaaaaaagtgacggtcaatttttcgcatggccgggcagaaaatccatctggaccgccatggagttgttcttcaaataaatagcacaacagatagctcagctagatttaagtgtagatgcgcatttaagaaatacttgtgctattaaacaagtacctgatattcaatttacatgttctagttatgtaccgggttggaacttccaacgcataccattttgacaaagtgacacgcattctatttggctaaactactacaagtatacaggctatgcaataaacaagacaatcatatggccgtaaatatcaagagttgggcttttactccacaaattctttagatacgccagtaaagtaagctccaaaattccatcaagaaggtccctcgtgggagatacacgatatagtaagagacaggcgccttgaaactcccccaggacagacaaaggaaataaaaactccctcccatgattcgcaaaatatggcaggaggtttcaccgtaggtgtatagtcacaaggcaatgacaatggcgagaaagagaatagggctcacatatacaaagaaaagaaggccgaaaaggcaggacgctaatggggaatcactgaaggtgggacgtaacagctgagacacgctcgaaggcagcgtcaatgctgttgcaaagggcgttgaaggttctcttggccgaatcgctgacttcagagctgtcaatgacgagttggaactgagcattcttctcggtcgaaacaccctcgaatgtgaggtcggcagcgggcgcaggagaatcaacaaagagagcaaaggcaggatcggactcatcaatctcaacatcagggttgacaacaccaatgtcagactggctgaatgagtcgctagcagaacgctcgacaacaggagcttcattcttagagctctcggggaggctgaaggaagaagaggattttccggacagagcttcgacatcgagggccgggccctcgggaacctccatgacagcaaatacgggagtgttaccgtagttcatgtcgattcctgagttccagccggcgttgttcatgcccatgctggagtggtccataccctggtttgaaaccatgaccatgttgggctgggggttctgctgcatctggaactcttgaccacggttggcgttcgagtccttaggcatagcctgcatgttgggtgcagcctgctgaacttgttgctgttgctggggttgttgagattgctgttgaggttgagcgggcagggtgtcacccatgtcgttcaggaagttggagaaatggggagatcccaggagcatgcgggccaagtcgttcaggcgggcattttcttcgtaaagagcgcggttctggaggcgaatttcgtgcgcctcgttggttctagcggccacctcactttcgagctgaccaatgtattctggagatgtgttagcaaaaagaacatcacatacgtattcgagtgttcagatagtcatacccttgcggcgagatcggaaagcgcgagcggaaaccttgttccgcaactggcggcgctccttgctgctgagctttttgccctcttcgctagcgagaagacgctcgtcttcatccatatcggcctcatccttccgggccttggccatctgcggcataccattggaagggctgggggagccctcgccattggccatggcattctgtcgcatctgttgaagtagacgagagatacgctcctcgacgacggggtcggggttacggggaccgcggacctgagacatagcatggcccacttgatccggacgctgctgtatctgaggacggaccatctcaatttgcttttgttgctgtgccttggccatcgcagcctgctgctgatgcatgccagggtacatgcgaccgacttgtgtggacggaccagcctgagccagctcatggcctccgagagcgttgggatcgacatattggctcttggtgccagggtttgcggggtagaagtatggcgaaggattcatggtttcgggatcaatctccatctccgatgggttccggcccggtgcggtgttgaagtcaaattgtgcgtcctcgcgcttcatgtgatgaccagcatacacttcagcgttcacgggaaatacttgaccgttgttgaaacccatcgggacctggctgtaagacatggacaaagcacctggtgggagaccagtctgttgtctgtgttcgtcgtattggtggcttggggcctggtatgctagaggagactggccacttgaggcaaagctggcactgcgggcgtcactggcgctgaactctgtacttgcgaccgatggttggctgaccataaccttggagcgagagggatcagatgtgtaggtgagttgatcaaagttgatgaatgagtcgagatcctggtcgtagttggccactggttgcataggatggtctgcgagagtcgccatggtgatctagataagtgtcctcgtgtgtgtagggggggggtaggcgtaaataaggcgtgagatatggggtgagatatggggtataggggggtataactgagataggttgaacgaaagataaaaaagagggagaatataaagataaagaggatccgaaaaacgaaggtctaaagaaatatggatttggatctagatggatagtgaacctgggagtgaaatggggaaaagggacaaaagtgttccggaatagcaacaggggcttgcgcgtcctttcttagtaagcgggggcctcaggaatgcagccccgtgattggcccaattgccacttgacggggtttgtttaccgtaccgtatcccgggaatgttttcactattttcagatctatatgtaacatacagatgtatacttcagctactatctactaatgagcaatcaattgcttgaaagactgtattttgcgccctatttgatagcctactagacattcaatagtcacagtaaccccctgttaattcttttgccggtcaaaccttccaggtgggccaatctcagggcaggaaccatccgatcccattggccgtcgggcgaaacttgccaagctcggagttactacagcgtatggtattgtaactgtacctttttgtccctgtcatgacgcaggtggctatgccatgggctgtttatcgaagattgtccgctttagtaaactatacattcctgttgacttcatgttgttttggatcagctagagatgcgcgagcatacagtatttttaggtcctgaaacttcgatcttcaaagacaaaaacctactaggcttgttcagactaacggtgactatcacagctagcggcgttcggggctgagccgattatttcgagtggcaccgggtgcgccaagcggtgggctcactctggaaaatatgtacagaaagaatactttgtacactttgtacactttgtacaacacacaatatccagagtacatgacccctgacccataataatactgatgttgtacggagatgtatccatatgcgcagattatgatccagggtgcgccttccatattcccatgtattgacaagaatcccttgtttcaaacccaggatgtacgtacgctggcgtctcgccggaacatacacggccaattgagccgagccctaagtgccggctagaccggtgtgagccagtcaaagacgtaaagtgggagtccggccctctcctgccccgtttgagaatcacaataagctttctagagtcggagcgggtcggccaaaaggtcctaaaggagatcgaacggccatcaagctcggtgatccgtgcacgtgaggagaggagctgttcctaatcgggctagcttgtccgactctattaaacactaaatctctgcctgtcgatccccgaaggatgcccgaggccctgctcataaattattatccacgaattccgaggttgactccgtagaatattcttccatttccaaggtttctatcaagttgcctctttggattgcccctgaaccttaaccaggcgaaacaacacaccgtggaatagctcgttattgcccctttttgttttatcctacccaagaatcaactttcccctgggcctcgactcttcggcagcccgctctggtggtgaacagaggtcatctcgatctatggcactccgtactacacacgacataggtagggctgtttcagattaccattgatccagccgcttagagtgaccgcgtgcaaagaggctgagctagttatgcgcctccgtgcctgaacagccactagcagtagcttgttccttattaaaaatagatattgaaaattttctgcactccgtacggcatttcactagggtcgatcatgccgatacataaacggtgatcactgatttttgagtcaaactagtaagtatttacaatttttgaagtctctgcaggaacgcctctttgtgcggatccttcatcaaactgttttgagtctcgggcagtggatctaggccattggctcgatctacctccacatccggcaattactcccttgccaacatgatatttgcctgaccgttcatatgattgattctcgtggcatggttcgggtacacacgtatgctacctccgctaatgcaatcacggtctagactatttctcttccttctacccattgtctggttgtctgacgccttctacaccctgatctcccggcccttcaaccctcaagaccctacactgtgtaccctgccaacggctccattttctggttgtctgacgactcattccagacccgctcagatttgaaatgagtctgagtttgttcgagactgttgaacgatttggtggagatgcagaaattaaggtctagatctagtacagcttattgtggacaatgagtagaatttggttgtgttgcaactccgatgctcgactggagatcttgatcgatcagtctagactttgtttgtttgggtattgagaacttgacctagtcttacccggtcttctgtgatatggagcagaaatatgaagcggaattgagcacatttacgtgtcgttgtggacttatacttttcgtgttactggcatttgggcgagataccgtagggttagccctcgacgatttagttcccggcgtctattagacgtactgcatcctctctataatttatatctagaaaattaagggctatgtcttgttagatatttacagattgaagagaaagaaaaatctctccatcgactttcattcaactcttttagatttcttatgttgtactgttgttccccaatatatatttctagtttctagtttggttaccataacaacgcacagaatctaaggactatcacctccagtgagacctgtagacataggtacatatacgtacgacctcctataatttagtgaataactcatagcaagatacgagcacaacgatgcaaagagcgacgccaaggaatataaattgccttaggcaccgattcattcctctttcggtccccgaccccataatggctgtcaagtagcatcagatttgttcgtattcgattcgatgactcgataaatgagaagttcaatgtgatcatagtggcgcattttgattctgcaaaggggcttgagcgtggatgccattgctactccatacatgtagttatcttatatgaacccccgcccgaacttcggcaactacttcagatatccaacacttggacctcgcgaaaaccactcaaataccaagaactccaacctgctgaagctatgacatcggccccgacaattctggctacgtgcaagcagacacggtttcatctgctagatgataatccttcgcaggaggtatgggtagccacaacaatgatctagatgcccattaacgttcaaatatgttctgttgacagatcgatgtggagggacttaacatcatagtcgcatcatctgcagctgaatccacggaagatgcctcaaagccaaagaccaaaggaaaatcaagggccaaggctgcggggagagagctcatatcagacgcgcacctacgactcaaggcaggcgttcactatgggttactaggtcgcaacggaactgggaagtcaagtgagacagagccccgcaagtactgtctacaaatctcagtatactgatgataccagcgctgctccgggcaatggctgagaaactcattcctggcatcccgcatgcgactcgcatggctattttgcagcaaacagaccagcaggatgacgttacattcggcgaagaccctaatcaggacaaaactgttttggaagccgttctcagcagcgatgaaagtaggaacgaggctgttcggatgacagaatgtcagtatgcctattcaattgggggttgtacttgactaacttgacaagttctatcgaaaagttttgagactgaagatccaatgcagcccgtgcgggcgatccgtaaaatccggcaccagaaagcagaaaagcatctcttcctggctcacaagaacgcaagcctgaaaagcggtgctcgaggtctacaagcaagaaaagacctgaaggctgccgaggggaagctcgaggctgcatcggagatgtaagttgcattaattcgcgctagagactatatctaacttctgccaggttggcccaggatgtagccgctatcgatgcggagacagtccagtcggatacccaagctgccgttgagacactacaaaatttacagtctcaaatcgaagacgtaagtcttcgtaggatgaccattcacctgctccgctaacatgaaacaagatgaaacttgccgatatgaagcaacaagcccgtcgcgttcttcttggtctcggctttaaagaagacggattcgagaagaaagtctctacgctctcaggtggctggcgtatgcgatgtatgctagccagcgttctggtccaagaccccgacatcatgatcctagatgagccgaccaacttcctcgatctgctaggagtagtgtggctagagaattacctgaaacaactccgcgacacatcagaaacaaccatcgtcttggtttcacacgacagagatttcatcaatgctgtctgcgaggagattgtcattctgcgagatcagaaattgacttatttccgagggaacctgtctgcatacgagcaagatttcgaggaacagaagctctacctagggcgcatgaaggaggcccaagaacggcaggttgcgcatatggaagctagtatccgggagaatatgaaaattggaaagaagaccaatgacgaaaataagctgcgacaagctaagtcacggcagaaaaaggtcgatgaccggatgggtcttcaagtcagcgcaaacgggggacgtttcaagctgaaccgtgatctagtcggatggcatctccacaatcgggctgagatcgacgttccgacagatgaaaagggcgcgactatgagcttgcccgatgcgacggagttgcggttccctgggccgctggtatcgcttgagggtattgtcttccagtacaagaaaaccgaccgcgtcatcctggatgacgtgaacttggttgttcacctgggtgatcgtgtcggaattatgggtctcaatggatcggggaaaacaacgctgctccgtattttgacgggacaggtgtctccttccaagggcaaggcgtcgactcactcccggttgaaagtgggctactatagccaacactccgtggaagagctgcaagaacgtggccgaggcgagcctagcttaactgcgctgggcttgttgacaattgagactgaaggatcgctgaacgagggcgctatcagaggtctactttcttcaatggggttagcgggtcgtattgcatctgatgtccctgtggccaagctgtcaggcggacaactggtatgtgaaacaatgtggaacattaaagcaagctactaataatatcgtcaatttaggtccgccttgcattagctcgaatcgtctggagtgcaccacaacttctgattcttgatgaaatcaccacgcatttggatttccacactgtcactgcattagctacagctctctcctccttcaatggcgccgtgctactaatttcacacgatcgtttccttgttcggtcggtaattgagggcaagcgagataccgagcataagcttgatgaagatttcgaagggctggaggaggaagagaccgaagaaacgccaaggcgccggtcggtctatgtgattaaacaaggcaagatgaacgaacagaagaatggggtggagcagttcgaaaagagcctggtgaagagggtacagaagttgttagcgactatagattagttagttaactaactaaatggctgatgtcgtgcctccatgaccaattattcttccgcgggtgaagatatgatatcatgactcagcacggagcccgccgagaggcatgtgcgataagagacattcccctcattcctccgcggagtatctcattgcatatatatttgcaacatgcaccattttaccccttgaaagaacttcctcatggctggcttatgcaagcggatcttgtcttgccctagggttgcccgtcagtggggcatacagactcgacttcagagcactcgcgccgcatcaagatctaacgccaccgtcgtccctgaattgcctcctccgcatcccgcaaccgaggcctccaaaccgtcaaaattcaagtccacgaagcccttctccgaattcctcaccgataccttcaatcggcaacatgactatctccgcattagcgtcacggaacggtgcaatctccggtgtctgtattgcatgcccgaggaaggcatagacctctcgccctctgcgaaactgcttacatccccggagatcctatacctatcctcgctattcgtctcacaaggcgtgaccaaaatccgattgactggcggagaaccgacggtccgcaaggacatcgtgccattgatgcaggacattggcaagctgcgacaaaatgggcttcgggaattgtgtctaacaaccaacggaatctcattacatcgaaaattggactcgatggtggaggctggtttgacgggagtcaatctcagccttgacacgctggatccattccagttccagatcatgacgagacgcaagggattcgatgctgtgatgaagagcatcgaccgcattctggaaatgaataaggtcggtgcggggatcaagttgaagatcaattgtgttgttatgaggggaatgaacgaccgagagatccttccgttcgtggagctgggccgcgagaagccgattgaagtgcgcttcatcgagtatatgcctttcggtggaaacaaatggaaccaggaaaagatgttctcatatcaggagatgctggctgttatccgagagaagtatcccacgttcgaaaaagtggccgaccacaagaatgacacgagtaagacataccgtgttcctggcttcgagggccgcgtgggatttatcacgagcatgacacacaacttctgtggtacctgcaacaggctacgtattactagcgacggaaatctcaaagtctgtctgttcggtaactctgaagtctccttgcgggatatcattcgtaaggagaatggtgggagcccgattgacgtggatgcaatgaacaacctgcagctgttggaaacagtacaaaacgcagcgcgccttagcgacgaaggcggcttggtgaatgaacgagaacgtgagattctcgacatcatcggcatggcagtgaaacgaaagaaggcgaaacacgccggcatggcacaacttaaggatatgaagaaccgtcctatgatcttgattggtgggtagccttttgttttttttttcttgatgattggaaacgctttacgacttgtagatcatccatatgaacatttcttttggatctcatggcattggcgatattttgataccatgtatacatgcaattgatgtgtttagacattgtttgaatcattaagctgatagatgaactagataataaaccgccatggaggtcagggtctccctcttggtcttctataccagtacatatactttcgcatctccctacagcttcccaaagtcgtctctaccaccccgggcgctctaagccagagaccacagactgtacttctcgtccatctccctctctacccaccacctcagacaccgacctccctcaccttacaccatccaagaccgtacacatgacacagatcaccgaaaagcccgaaacaaagcgcgtcgccacagccgcctgcaccgtctccttctcaaacgcccgaccctgggaaatcctccgcgaaggccaaaccacgcacaaaggcgacgtcttcagcgtcgcccggatcgcgggtatcatggccgccaaaagaacgcctgatattgttcccctttgccatcccggcattggtattaccggagtcgaggtcagcgtggaactcgttgggcctgcgggggacagggacagggatcacggcgccatgcatgtcgtggcgtcggtcagctgcttcggtcgcacaggcgtagaaatggaggctatgacggctactatgggtgcggctttgacggtttatgatatgctcaaggctgtggataaggggatggtcattgattctgtccgattgttggagaaacagggtgggaagagtgggcattgggtacgggaatgactcgtgtagttaatttgagtagttgtaggtacttgattgctatgtagtactccgtatagactctttctttaattaaagtggatgttctatctcttctccatactgcaatagccctaataccccttgagcctatctatacccgcggatcagccctatgggccgtttaaattctcctgggcttcaccgtattttcatttctattttttctttcacagccaatgatctttatatgattggcgatatacaactgtagcaatcgttcctcctttctgcattcctctatgtggccatggctcatggcccaagacattttcgagcccacatcactcaaatcggcttagccttgcagtcgaggttttgcaattttccttttttcccttcaaacatatgagaattcttaaaattcctctgtttgaggctattcgtctcaatttgagacctatggggttgtgtgggtgtaattgaaaaccctgcaaaaaaaaataaacctccttcgtttcatcattacatcgacaacgcctcagcggcaacgaggtcagcacaaaaacacagactgtgctttatcaagccctgccgaattttgtcgccgaattagaatgcatgtcttggtgacccgtacgttcgcctgggctactggcgtaaaattcaactaaccgctttatacagttcgcaagtggcggaggaaaaccgggagcgccataatggcagtgctcccgcccttgaatttcttgacgctacactattcatatttcattgcgacatgcataatcgccagtatcattttctatctgacatcgtcgccatggcgtagcgttgcctatgtggattcgattttcatgtgcgtcagtgctatgacgggtgctggattgaatacggtatggactgaatctcatggctatatctcgccgaggctaataacctgaccaggtggatctgtcgactctgaacagcttccaacaagcagttttgttcactatgcttatcctgggccatgctattctcatctccctcactgtacttctagtacgtaagagggcgttcgaggcgaagttcaagggtgtctccgatgagcgggaaagagagcgatctagccgtaacctctcggaagttgaactacaggccagggaccgagatcccgcccatgcaagcaccgggattgatctcctcgacgagagtatcgaaggacacggctgtaaaccacgcccaaagacaaccgtgctggtccaaacgaccccgggagagccatcatcccgtaatgagcagagatgggtggacgacgaccagataaccgtcggcggcacaccccgtcatcatcaccaccgagtcttccccatggctggcatcggggcgagaccggatctgcataaccacccgcgcgacgcagcgcccaatgtgcccttggtcgtgaaggactcggtgtctggtctcaagggaatcctccgcggtacacagaagtacatagcctccaagggacttgtgtcccgcaactcccagttccacgatctcactcctgccgagcgtgaggaactaggcggtgtcgagtacaaggccgtctcgttgctgtctgtggttgtgttcctttactttatcttgtttattatattcggcatggtcggtgtcggtggctggctggaagccaatgatcccgccgtgacgcgcacgaacggcctctcgcctttctggacgggtgctttctttgctgtttctgctttcgtgaacagtggcatgtcgctcctggacgcgaatatgactgctttgcagttgaggtaggtgctctagaccgcccgtgtttcaatattcaaacttgctgatcttctctagggcttacccacttctcacaatgggatttctgatcctcgctggaaacacccttttcccatgtttcctccggttcattatctggactatgagggtcatgcttccggatcggccgatgtggcagtcgtggcgcataaccctggattttatcctggagcatcctcgaagggttagtcgttgcattactctaatagcttgcaggatatagacttatcatcaagcaggtctatacgaatctcttccctgctcgccatacgtggtatctactcggcacgattatcatcctgaacggtatcgactgggcagcatttgagctattgtccattggaaacaaggacattgagactcttcctaccgagtaccgtgtgttggatggactgttccaagccctaggtttgtcaatcaatatcagcaacagcgccatatctgaaccagctaacaacttatctcgaaagcggttcgcgctggtggattctacgtcgtaaccattgccgatcttcgccaaggtctcttggttctatatggtaagtgcttcggtatccttagtctgtaatatcatgctaacaaaacctctagtactcatgatggtaagacctactagtatcacacccatacaccaatcccaaactaacatctcacccagtacgtctccgcgtacccagtaacactcacaatgcggtaagcaccccccgaacccaacccaacccacactagagaaaccacaatctaacacccacccagcaacacaaacgtctacgaagaacgctcgctaggaatctacgcacacgacgaatccccagactcaccggcaaacacaagccgcagcaacgtagtaatggacctaatccgacagcacctcggccgcccaggcccatcggaaacatcgcgcggctacttcctgcaccagcagctgcgctcccagctcagccatgacctgtggtggatcgcgctggcggtgttcttcatcgcgatcgccgagtcagaccactacaacaaccagcctgtggccttctccaccttcaatatcatcttcgaggttgtctctgcgtacggctgtgtcggtgtgagtcttgggttccccgggaagaattactccttctgtggcgcctggcatacgattagcaagttgattcttgctgctgtggctttgcgtgggcggcatcggggtttgcccgtggctattgacaaggctattatgttgcctagtgagtctttggcttgggcggaggaggaggatgctgctatgcggagggataggtctagggcttgggctcaggagaatgggcctgttgggtctgtttagatggtgatttttgatatacccccttttgtttggccattttattttttagactgtttccacggtgtgtggatttatgagacccatgatgatatgacattttgaagataaataattcttttgtaggactgagtagctacccatggtgtatcctggtaaacaaagtagacatatgcaataaccgtgtgaagtagatggacatcatcggggacatggacaaggagatatacaaattaaccaaaaattagacgatctactcgtcctccatctccagctcgtcttcatcttcatcttcactctcgatctcgacttcctcctcgctttccaattcctcttcaccctcatcctcgctgccatcgtcactgccagcaacaccgcccatatcctcatcctctgcatcattcttcttcgcctcctgtctccgcttctcttcctcgatacgaccttcttcgaggacagcagcacgctcgtcacgcagcctacgctgcgtcttaacaaacgcaccgacaggagtagtctcccagtcaacatccttgaggaaagactcgacgctagagcggttgcggggagcataggagacgttcagacggcgctcctcgatccagcgggcattggcctcaaccttctgcacgagcagcaagatcatctggttgaccttggcgttcttgtttccaccgctgcgggcagagacctgcttcagccagcgcttgagggagacaatgacgggcacggacagttccgggaacgcaatgtgcttggaccacaggacgaagaactcggaaaggagttccgtgacctgctcaccgatgccgtcctggtaaattcgcgagcgcaggtaggatttaggcgcgcggatcgctgtgttgaagtccaggggcttgagcgtgctggacttggcgggcttgcgcatctccgctgaggtcaggacctcgagaagggaagctgagagcgggatataggtgcctgtggcacgggagatgcggagcagggagcgcgtcaattggaagcgcagggggaagtacgtggcggtggggatgaggcgcatggcgcccagggtgatttgcacgacggggtagataaggggacgcagagcggactgcttgccgatttgggcctcgacaagaccatcacagtgctgtgaaagcacacgggaccagaagtccagcgagtgcacgtattgccagttgtagatggtcttgtaggactccttggaggtgtgggtgatgctcttgcgcaagtgcatagcaagctgacggatgaaggagaatcctgctgtgtatgagacgttctggtcaatgccccagatttcggctgcggagttcttcatcaagttcacgcctgccagagtgtgcaccgttgtgttgcggctgcccttgacaacaccctcgtaggtggccttgagcacactctccctgatacctgcatctcccagaaccataaggcggcggagaatcaagaaacctgtgatacgggtggcgtcggccgtggacacatcagaccaaattccgacgacaatcttgaccagtgtcttcagcaccttgcggaactgaagaaggtaaggcagcatgggctcaattgacgccagggtcaacttgagtgtcgatgcatccgacaagttaatcagaagctgatgaactgaagcagtgtgcgatttgatcagcggtgtgagggtcttgaatttcttggaatccaatgagaccctgatcttgccagaagcgctctctttgacggggagatgatgggccaggaccttggggatggtgttgagggccgtgataagaacctggtggtacacgttcttgtcggagatggtgtatttttgctcgggggcatcggggtcattgacataggcggccgcacggaatgcgagcacagcctggcgcatagctcggatcgagttttgctcctccatcaacttctgccacttcttgaccatctcaatagtcaaggtctcatcctcgggctcctcttcttccttcttcgacttcttcttcttcttcttggccggctcctcgtcttccggttcttcgctttcgctcagagcgtcaacctctgaaagatcgccttggtcaccgaaatcgagcagttcagaatcgttttccttaagatatttatagaactcggggtccttgtccttcaatgactccagctggtctttgtgctcgtcataagcatcgacactgtctgcgtcgtcattgtcactctcgccctcggacgcctcagcgtctgcctgtgccttgtcttctgagcgcttgcgcttgccaatcttgggggtggtatccttcttgctcgccttctttcccttctcttcgggaatatcgaagccaccagcgaagaaatcgtcgacgttcatttcggaaaaggcattttccttcttcaattcctccgggttcttctctgcagcggcttcggcttcggcgcggcgagcagcacttttttccttgcgcttgtcgttcagttggtgtctctgcttgatcttggcatgcgctttgcgtcgctcaaggacatccggcagacggttctgcacgaacttcttggtcgattttttgccgccaaccattttgagagagtaatgcagaaagagtctgcaagtgtagcttggtcggaaaatggctggtcaaaaaaaaaattggggagaaaatcggcgggtccacctttcagaccgcctttggcatcgagcgataacatccaggcaatctacaagacaaccttggaagacaaccttcgattacgattgacgattgacgacttacggttattgtacatagcgagaatttatcaacaatgtactcacagcgcccactttcttatgcgccgaccccctacagctacacacccaatcccgcccggtcggccacaatcaacctcgatgaagtatgggtccttgtctccgcattgatagttacattgactaatgccactttcttaggaagtaaaactagcatccagtgcagtcgagcgcgacttatacgaatcactagccgaaatatacagcatcattgtcaccctggatggactcgagaaagcatacatcaaggatgtggtcaccgaggcagaatataccgagacgtgcacacggctactgaagcaatacaaatctagtattggagatgagacagtatcgcgggagtttgtggatctggaaaccttcaaacggacctggggggtgagtgttgctctccattttaccccgcaaactccgatgcatctctgacatatgtggacaatatagctagaatgcccacgagccacagagcgattgcgcattggtcttccagccacagttgagcaagcgtctcacggtggaccgactcccagtatgggtgcaacggcgacaggacaggctggcggtgcctcgggtagtcttattctggcagcaaccgaaaacttcatcaccttcctcgatgcattgaagcttaatatggtatcgaaggatgcactgcatccactcttatcggaggtgattcagtctgtgaacaaggtaacagataccgatttcgaagaccgcggcaagatcattcagtggttgatcgcattgaaccaaatgcgagctacggaggaattgagcgaggaccaagcgcgtgaacttgcatttgatattgagcaggcttatcagggcttcaaggctacgttgaactgattgggggatcattgacttggtgctccggcaaggcgttccaatggacggtagaaataccatttcgttttgatgtattgacatgttcatcggtttttgctagctaaatatacccactctggcttgtttttgattgagtatccttgtataagtacagcgatttcaggcatctactactgtgtctcgaagagcatctagcttgaagacatacggtgttcggactaacctactctatttcccgtccgatatcaactgtttctcactcacagcagtcttcatgtcattcctgttcttctgttgatacattgatgcctgatagttcaggcgacattcaacccgcggaacggcagcgccggcctttcctctttgggaatattttcttttttctccgccacaatttcgtcgagttctcctggctgtgaggtcaatttgttgattttcattcctctccggcaacacctagagaacatacagttgtcaccatgatcagtgccacagatgagcctctacatggttagttcacaattagcccctctggttcatctggtccacaaaagataatggaactgataagcgcagtgcttgacctcccgcaagtctacgagaagccctctggaactgatctcgtgaaggctttggctctgttgagcttgcagccacgcacatttggcacgaccgctgatgtcgtcaaaggccctgtagtccagcctgcaggagtgacccggtatctcacatccatcatcgccagtccattagcatggctcgacaacgatgaactccgaggggcaatctgggatgcggccgctgcacgactaagtgaacggtctggtcgaaccggtaaccaggcgatctatccagctgtgttatgttatcccgctgaccgtgactcattcgttcccagctatgccggcaatgtctcgaatattcaccgtgcccacctcctccggcgaagaatacacactgaccctccacgaaccgtcactaactgcggataacctcggtatgaagacctgggtatcttcgtatcttctctcacgccggcttcacaatcttggatcgccgccagcacttgtcacctcctcggctactccctccacattgaaaccccagaaacctctgcgggcactcgaactcggtgccggaacgggcttggtcgggctttcctttgctgccctgcaaggcgagtctgcaaccgttcacctcaccgacttacccgagattgtccccaacctcgctcacaacgctgccttgaacgtagaactcctcaacagaaccggggcgactgtaaccaccggcttgcttgactggtctgtcacaccgtcgccccttccaattgcggaagagcagtttgatgtgattctcgcggcggatccactgtactcgcccaaacatcctaaatggttggtggacaccattaagccctggcttagccgtgcgcttgatgcgcgagtcgtggtggagatgccgctacgagatgcatatttgccgcaggtgaatgagttccggcagcggatgggcgagttgggcctggctgtggttgaggagggcgaggaggtcggttacgatgactgggagagtgcggatggaggcgcactggctgtcaactgctggtggtcgatttggggatggagtgaaaaggtatagtggcggtactaccaggtcatattgggaatggtgaccaaacgaaatgacgataatagacgatacacgatatattagaaatagggattcctatatacatagacattggttattgagcaatgcaaaccttggaaacgaatttctcgtttcactttttagtagaatcaacttgatgaaccaggaacattgttggtcgttggtaaaagaggagctgatcatcacgtggcgatgacgtcgggggcacatctcatgtccagtggacttctaccttgatctatgtttctaagattcattaataccaacaagaagaatggcttatttttatatccattcacagagaacagctattctctatacccgtatggtcagtcaatagcctagcgtcattcaaatcaagcaagtcatgctaatgcgacaacagagcatagtccaggctccagaccaaactgctacaacagccgcgaattcctgaaatctgatatatcaagctgctattgatagccagccagatctaacgacgaaaattgcaatcgcatataccaccaaacatctgcgcaatgattggacttctagcccttacctccatcccaacggtgacaggtgtctccctcgcttctagcgagcagcgcaaagcaaaccagcgcaaagaagatgcacgtcgcatggtgaagttcaacatcgtagcagaatgcgatggcgacacagatgatgaccgcgaattgaacggcatgactgttgttgtaagagacgagaaggtaagtaaatccaatgcaaacaggattaaaagtctacaggaacctcacaatccctccgaataatattttaatcagagctcaaattaaagaccacatagactaacacttttaccctccacaggtctacctcgccgacccagattcctccaaacggtccccgccagctttcacagccctggccttctatatcgagtacccagaaccggaagaattgaaatatctcaagcgcgagcgtggcctcggcctgccgacttacgttcaggacaacccgccccttcttaactggatctacgcagataaggaaacgcatgagttgcggtacgggaatcggtcgcagagcgtggagcagctggtcgagccgtgggactggtgtaagaatgagaagtacattttgctcgaaaagaagcagaatgctttcattgcggttgaagaggaggagggtcaatgggcgcttcattatgatcgggatggcgatgagcttgcgcgcgttcttgaggagcagggactgttggattgtgcttttgtgcctgtcaaattggtgaggaaggttgttgaggagaagccgccgccgccgccgccgccacctcctgctgctgctgctcaggctgctcaggctgcagctccccaggttcaggggaatggtcagagccagaagtagatggattgggagctggacaaccgttatgattgagccggacttttttgtgtatatacttgatgagatgacttaatgcatttatgattcgatcatgattatgggaataccacggtagtaaccttggaatattttagtgtacagagaaaaattggacatttaatcatccagtccagcccagctaccagtgtcgctgacgttgccactaaccgctgcggcagccttcctgttgcgactggccgcaatagcaccccttttgttattctccatgcgacgttcaaagccactcttggtactaattctcataccacgggcaccctttccatcatcctccttatcggtcaatcttggggcctggcgcgccttgacaccatgcctcttcatatccttcttgctgttcttgcttaggttcggcagagcgtcgagcagccatttctggatggacttctcgccctcttcgccgccgcgtagcttctcgctgacgtcgatgatgttggcaatgctcttcacgtagggaatgtcttccttagtgtagtaggtgacagcgataccgccctcgcgaccagcgcggccggttcgccccacgcggtgaacgtagacggcggctgagttggggatatcgtagttgaccacgccattgataccgcggaagtcgacgccacgggctagcagatccgttgtaaccaaaatccagatctcgcctttgcggaaatcgcgcatgatatcggaacgttggccatctgagagatctgaatgaagaaccgcaatacgtgaggatccacctgcttccgcggggatatcgtatttgagttcggagtgcagagccaccgcacgaggaatggtctgtgtgaaaataaggaagggagggcggaggcggatatctgaggctgaggctgcagccgggcgaagaagttgacgaagtcccattagtttaccttgttctgttgctgcgtacacaagtttgtggtcaatgttggggattgcagagtctttcaatcctacaaccagacgaagtagtggatgtggctcgcttggcttttgtcccatatcttccagtcgctctctgatggtcgacttggtgagatcctcgatattggatcccatggtagctgaccaaaggccgacacgcaggtcgggatgtgagcacgctttccagatatcgagtgtctgttcccggaacaatgggtccaggagaacatcggcttcgtccatgaccagactccgcactagaggtaatgttgccacggtggtcgtccgattcgcagatagagcattaaccaacattagaggtgtagtgacgagaatatcactcttggtgaccgggatgttggctcgctcctttgctggcttgctttcggcaccttcatcttcggacccggatgattcttcgctgttctcgtcaagaacattgccatcaccattatctccaacacgcataccctttctcataagcgtgatcttcacgccagttccagccactagcttgcggccctcgttgacaatctggcttgcaagctccctggtgggcgccacaactacagacaaaataccatgctcgtccgggtttgagtggtggtgtcgaacaattttgttgatcacagggatcaagaatgacaacgtcttgccgctgccggtgggagcaacgaccagaagatctggctcggaagactctccaagaagcaatggaaggcttccaagctggacctctgtaggtacggtaaaaccttgctctgcaacattctctgcaagccgcgaggagatcttgtatttggaccgaagttccttgaagttaagtagaggctccgggaacaagcgtctggcacgcttctgctccttcttactgagagtcggcgcctcttctttctttgacttcttcttctttttcttggactctttggtagacgtaggctggacttggatctcttccaagtcgcgcatgtccgtaaccttgatcttgtgtgagttcaagatagtgcgacgctccacttcatccatggaatcgtcgtcatcggatgcggcatcctgagcagacactttctcagcgtcctcggtcgcagcagcggtttccgtcacactagctgcagggcgcttgtttgaactgaaaaagtcgagttcagggacatcttcctcgtcctgttggatggcagcgcctctctttctttttttgccattcttggcagactcgagcttgtcggtctccgccgtccggaaaagctgcgggttagctgctttcccggtggatggcagacgagagtccgaggccgaggaggtaggctttaattttgttgacctggtcaacaatctgaacgcatccatatcttttgtggttgagtcgaaaatgtcgatgatattctgaaaagaaaaaaaagtggtccgccgactttcctcccggaccaatcagcgttgagcgttatatatggccgccgccgaggaaaaataacaagaggataaaccacagatgaagtgtctgaacataagacatatatgatatcaggactatattcatacctaggggatccgggtcatgattacagagaggtgtgggaagaataaggatagccgaagtcaataaacctttagattacagtagcttttagagcacaaatagcacaggaatgaattgcaatgacaaggtctatctcagacaacagtttaaattccatcgtctatcatacacagcgcgggacgattaacatatgaaagaaaggaaaggacgattctcatctatcgacatccatttagtgcgcgtgcgcaggctcgccacggtaaccaataatgttcatccgaccgatcatctcgccaacagtgaagaagccaatgacctcagcggcagtgacaccggcgagggcgagctgcttggggctggcgttgcggatagaggcgaggatagacgagggggaggggagggtcttgagggcggcagggttggtgatgaaaggctggaagtaggactggaaggtggccaggttgctaggaggaattgttaggtcgggagtaaagaatcgagtacggggtccgacttacggaggagccatgttctggccacggaacaccagtctgccgagctcaattccgaccttggagtagtagatggtaggagggatcatggctattgattgacggttagttgtgcacgttcgcgaacgtaacccgcggattgaggtcaacaaggaggttgggactgggcgccacgattccaaccggatcaatcggtcaatcgttgccttttttcttttaataagtacccaatgtccaacgctcctttgtagccatccggacgggagaagaggagtgtcccttacaatcgacgaaagagatgaccttgccggcgggtccaccgatcttgcgcagggcaccagcggcattcgcgagggcagggccagcggaggcagagaccttggacagacccgcagaggccttggaggcagctgaggaagcagcctcaccagccttagtggcagcctccgaggtggaagaggcgtgtctgacggcggttctccgggtcaggaactgcgattgccgcaggacggcacgggtgacggcgggcattttgaatgttgtggaggaaatgagtggaaaagaggagggaagcaaaggacacccgaagcagttgctaataggagggcagtatgatctaatgatctggagaatcgcgcaacggagaaccagatgaagatttgacgctcgggaacttcaggaattacgggtcacgtgagtcgccgtttatcccaagtaaacaatttacttttctggaatataaatttggaggagatgtaaggctttatggatttacttttggatattgaagcgctagaaggtgtcaacctgaaagtggatggtaacctgagcaccttgttatagcattgtacattcatacctacatccggccttgccagtcgaatcacaaccggcacttcactccggatggtagaaataagttgataatttttttccttctagacggattgatgaatatatgggcttctacggtgtgataaatgctccgtagatttaattttcaaaaaaatacgcacatcgaagccattgtaagccaaaatatataaacgcaatattttgtatggagtatagatacactaattgttccaccagtcagtaagattgagtccagatttccaaaatccgatgcaattaatgcatcaaggacaacagataaatggtatattgagcaaaaaaagcgagattagagtggaatttactataagaaaaagcgactagcgacctataagccagagagaatggtccaaccaacatagaagctacccagggaagtatcagtataaagagcaaatatactaggggcttatgcataatgctacagcacttaaaccataaatctgttagatatctacatgcatagctgcctcctgtattcttcatcgtcaccttacaattgtgacaccactagacaaccgtagtagtcggtccaacgaaaaatagcacaggatgagcctagggttgaatttgtctcacacaatactacctccatgtaggtagtgaaataggaagagttgttacgcagctcctcactgcctatgatatatccgagaaattgattgctagatcctggtaggcgcgtaacacgaagcatgcagagattcgagtatggtgagacaaattgtatctacctatgcatgttgtacatgtagacatcgtatatagtagagactttcatggatgtaaagaatagacattgcctgtggctgtaaaaaggtttgcactgtttgtctcggaaaaatgaattcatctccgccggagaattgcctctcttgttgatgcaatgggttctcaccttgaccgcattatttacttgacccagagacaccccagattgatttctgaaccgaaccaagataacatgagaaaatagccctggaggaaatcagaaccgggagccttcagcacaatattaaccgatcgccgattaacattcggcccgagatcgagagcgggcaaggattgcctcattcagacggaaaaagcagttggacccccgcgcggttaaatcgaaagcccctccactccacttttcgctactccatatgtatcaccgtggggtgaacaatatgagatcaccggacattgatgcggttcgagtattaaagtggctgtttcctcgcatttaggcatttgttctccattttcttcctctcccctctccctctccctctccctctccacactatacaatgacttccgcaacaactgtcactaagaccaacatcggtgtctacaccaacccaaaccatgacctctggatcgccgaatccaacccgacagtagaggacatcaattctggcaagggcctgaaggctggcgaggtcacaattgaggtgcgcagcactggtatttgtggatccgatgtgcacttctggcacgccggttgtatcggcccaatgatcgtcaagggcgaccatgtcctcggccacgaatcagccggccagatcattgctgtcgcccctgatgtcacccacctcaaggtcggtgaccgcgttgccgttgagcccaacattatctgtaacgcctgcgagccctgtctgaccggccgctataacggttgcgtgaatgttgctttcctctccacaccgcccatcgatggcctgctccggcggtacgtcaaccaccttgccatctggtgtcataagatcggcgatatgagatatgaggacggtgctatgttggagccccttagtgtgtccttggcggctatcgagcgcagcggtctgcgtctcggtgacccgctgctcatcactggtgccggtcccatcggcctgatcagtttgctcagtgcacgcgctgctggtgcctgtcctattgtcatcactgacattgacgagggccgtttggcgtttgctaaatctctagctcctgaagtgcgcacttataaggtggaaattggcaagtccgcggaagagtgcgcggacggtatcatcaatgccttgaatgatggtcagggttctggccctgatgccctgcgccccacgctggccctggagtgcactggtgtcgagatcagtgtcagctccgccatctggagtgtcaagttcggtggcaaggtgtttgtcatcggtgtcggcaagaacgagatgaccattcccttcatgcgtctcagcactcaggagatcgacttgcagtaccagtaccgctactgcaacacctggcctcgagccatccggctggttcagaacggcgtgatcgatttgcacaaattgattactcaccgctactctcttgagaacgctctcgaggcctttgagaccgctgctaatcccaagactggcgccatcaaggtgcagattatgagctctgaggaagatgtcaaggccgccactgctggcgagaagttttgaacgaagagagtaaaaagatgagcggtatctgagagcattagtgggtttctggttggggtcaagagcggccgttggcgttggcgattttctttctatattcacgaatgatgtctagaggatgccattgggtagaatagaaagcacatgaaatggctatttgacataatctttggtcgatgcgatgaagaaggtagaaactgtagaggcacaattgtcaatgtaacagatggggaccttgcaagtcaaccaagtcaaaccctcccccgacgtcattcccggcaataagccgggctaatactggggaaataacagcaacaatcaaaaatggggtaaaaaatggaccctgcagcgtgaatccggagctactggagctagggtaccttgtataggcccgaaacccggggatggcgcacagccaagagggaccgtccgataattgcccgtctccccgcgcaaacgtttgacgatgcaactgagcaatatgtcaattccagctaatcatgtggaaaacaaacagttttctcgcgtatccccttgattcatgttgcatcactccccaccacccctcacttcagatcccggccactgcatcctttaaaaggtgcactgtccctcctacatcttgagtgtatcctgctgtgctcatcttgtgcttcttcagtgctcgcccgattttaaacatgaaaggcgcactgcttttcctggctcccctcgtgggagccgccgtcctgggatcgacatctcagcttgaccattgtcctggctacaaggcttccaatgtgaagcagttgggccagacattgactgctgaccttagtcttgctggagatgcctgcaatacctatggcactgatcttccaaacctgaagctcctcgtggaggctcaaactggtatgcttcttcatcattcccaagtgaatgtatactcataattctataagaaacccgtctccatgtcatcatctatgatgccgatgaggaggtctaccaagttccagaatctgttctccccagaccctcgagcgcaaaaggtcaccaaaaggagcccgctcttcgcttcgacttcgaagagaaacctttctcattccgcgttctgcgtggggacgaagttctcttcgacactactgatacaaagatcatcttccagtcccagtacttgaacttgcgcacttggctccccactgatcctaacctgtatggtctgggtgaacacagcgattcgctgcgtctacctaccacaaactatactcgcacgatctggaaccgtgacgcatatggcatcccctccaacacgaacctttacggtactcatcctgtctacgttgatcaccgcggagagaatggtactcatggggtgttcttcttgaattcggatggaatggatatcaagattgacaggactgctgatggcaaacaatacctcgagtacaacaccatcggcggagtccttgacttctacttcatggccggtcctactcccaaggaagtgagcgagcagtactcggaggtcgttggccttcctgctatgcaaagctactggacgtttggagtatgtcatttctaacttgaatgttttgagaagtaatattctgatcagtattcctttagtttcacaactgtcggtatggttaccaggatgtatttgatgtcgccgaggcagtttacaactacagccgtgccggaatcccactcgagaccatgtggaccgacatcgactacatgagtggtcgaaaggtatttactctagacgatgagcggttccctctagagaagatgcgcgagttggtttcgtaccttcacaagaacgaccagcactatattgtcatggtcgatccggccgtcagtgcctctggtaagggataattacttgttcccctctcacttctgctctaaccctgtgtgttaccagataatggtgcttacaaacgaggtcacgacgagggtgtcttcctgtaccgtgacgacgagcgtagcgaactctacaaaggtgagtttaccatcagaagcacaattcccaccttcctaacgtaatctaggcgtcgtctggcctggcccaaccgtctacccagactggttcaacgaagacacccagaaatactggaactcggaattcaagcgattcttcaaccccaaagacggtgtcgacatcgacggtctctggatcgacatgaacgaagcttccaatttctgcccatacccctgcacgagcccagaacagtttaccaaggatgacgacttaccccctgcgcctccggcagtccgatcgcctccccgccagatccccggtttcccggctgatttccagcctgggtcttcctcctctggggcttctctgtcgcagcgtgtgaagagaggtgatgttgctgtcgagaaacgtagcatcaacgagaaacggagccagggtggaaagggacaaaagactggcttgtctggtcgcgacctcattaacccgctctatcagatcgcaaacgaggctggctcgattagcaacaagaccattgatactgatctcattcatgctggcgagggttacgccgagtacgacacacacaatctttatggaactagtgagtcccctgtgtttactatcaataacctttctaacaataacctagtgatgagctcggcttcccgcgaggcaatgttgaagcgtcgaccccaggtgcgacctttgatcatcacgcgtagcacctttgccggagcaggctcccacgtcggccattggtaatatcaacaaatcccaaatcagtaccatagaatatgctaacccaatcccaggctcggcgacaacttgagccaatgggataaactgcgcgtgtccatcccgcagatgctagccttcgcctcgatttaccaagtcccaatggtcggcagcgacgtctgcggcttcggcggagacacgacggaagagctttgcgcgcgctgggccatgctcggcgccttctctccgttctaccggaaccacaactcgctcggcaacctggcccaggaattctaccgctggcccgttgtcaccgaggccgcgaagaagatcatcgatatcagataccgtctgctcgattacctctacacttcgttccaccagcagaccttgacgggtagcccgttcctccagccgctcttctacgtctacccggaggacagcaagacctttggcaacgagctgcagttcttcttcggtgattccattctcgtctcgcctgtcttggatgaaggcgccaactcggtcgatgcctatttccccaaggatctgttctacgattggtttaccggtcttgcggtgcagggcgatggatccgtcaagacgattaccgatctcgcggttaccgatatcccgatccacatccgtggcgggagcatcatccccctccgtacggagagtgccaagaccacgacggaactgcgcaagcgcggctttgagattctcattgcgcctggtgcggatggatccgcggcgggtgagctgtaccttgatgatggcgagtcgatcgaaccggctagtgctgcagagattcagttccagtacaagaatggcaagctcaagatcctgggccggttcgggtatcaccctaatgtggttattgaggctgttactctgctcggacagaagaataagcgtcgcgacgttgaatacgatgctcagagacagagcattacaaagaaggtcgacatcaagttgactggacctgctgaggtgactctgtgagtttcctacagtgcatcggtgatattaggaggaggttgaattatggatagtctttgaggtagtcgggctctttttttagaaagtgggatccatggtcgcctggaggttatttttccggggccaccacattcttccaaggtttcggtaccttgtagtactccaatgccacgttttactcaagtttgatcttaatttaggggtctcagccatggatcaataatgtgtgttgtaagcgagtattttactcggcaagatgagtcgacacggtgattggatagattgagtaatgttcctgcatgctagccccatagccaaggcgagttcatagccaagcagacgagtgagttagcaattgtgtaaatatgactaataattcagggtctgaaaggcaaccccaaaccaataaccccttgcatgaccttgcatgagaggaggtggaggttaggagggagaaagacactgcctggatacaatgaaattactctttcaactctttcaactctggaacccttgaacatttgagagacaagaataaatccatcgctattctaccaatgaggcaatagggctaaatcctgccaggtactagcgggctattaagggatacgcgccgagggaaactagttcaggcacaggccgctagttcctgagtcatctgatagaaaacggcgaacccgtggtcttgatagttattattagtatcggattggggcaattttacgcgagcagtgctgagtcgaacatactagtatattgttatatattgtaaaaggcaaccaaagcggaaactgaaaggaaatgtcttggacaaaggtctcatactgttgtgcggtggtcttagtggttgggtggcccgtgtttcacgattgcatatggatgcgataagtaatgataggcgttaatttgttagatggggggtttagggtgatccataagaaggctatccaatactaaagcctatgattgttaggaggtaatagatgtaatagatgtacggagtaataaatgataaatgccgtggttgggattgtaatataaaatccaagctggggatgaataaaaaaaagaagcccctcctgataaggccgtaataggctttgtcagtggagctatttttgaaaaggtctcataatacggagtacatagtatgatgtatattatcctattgaattttcttttatggacccttgatgcaaccgtagttgtgctcataactacgcgagctcaatctgtaacatctgatcgccgtgatcggctggaactatacaggacgctttgggtaaatgtacggattattcatgtatggatgtatggatgtatcgtatcaatacaatgccacccgtggttgtttccagcctcatccgtgtctcacgacccgcaaacccaaggacatgagtcttgggtgctccacttccccctcatggaagatcccaaaggggtccactagactcgtccgaccttttctatttgtctcagtggttcgctggccttgtccgttcatccaatcatgtcctgccagtcactcccgcctccctttttttagtagcgtgtggcagtgtaatatatttctactgatatacggaatattccgtactttgatatggagatagatatataaggcggtccctgtcgttccttcccaaggttcttactataatcccactttcgtttccgctttccacgctcgagatatttatatttaatagggtcgcttcctggacttcctttcttttcgtgttcactcacactcacttcttgacgcgtatcatatcatacaatgccgtcgttcatgaagttcgcgactgcggctttcgccgtggctacacctttcgtttctgctcagacttactctgactgcaatccgatggagacaacatgccctgccaacaagggtctggcttcgtccagcgctcacttcgacttcacccaggctagctccctcgaccagtggaagatcagtggcggacaagttcccactaccgccaacggtgcccagttcactatcaacaaggaaggagatgctcctaccatcgtcagcgatttctacttcttctacggcgaattgtccattgagatgaagacttctcctggccaaggcattgtcagctccgcgtttttgcaatccgatgacaaggatgagattgactgggtacgtgacatcgaaatcggatcattacttccaacatacagaataattgctaaccgaaatacaggaagcattgggcggaaagactgacaccgttgagaccaactacttcggcaagggcgacacctcgacttatgatcgtgagacctgggtccccgtcagcactcctcaggactctttccacacctacaccatccaatggtccaaggagagtatcacctggttgatcgatggcgcgagtctccgcactgtcaagtacgcagatgcccagggtggcgctcgcttccctcagacccctatgaacatccaccttggtatctgggccggtggtgctcctaccaacggacagggtaccattgactgggctggtggtttgaccgactactccaaggggccctacaccatgtacatcaagagcatcactgttaacaacgccaaccccgccgagtcttacacttggtccgacaagtctggctcctccgacagcatcaagttcaccgggtccaacgccgtgagctctcgcagccctactactactgatgctgccaccgtctcctcttccgaggctgcttccactactgagtctccttccacctccgagactccttctaccaccgaggctccttctactactaccgagagcacttccagcgctcccactactctggctaccaggacctcaatctcctctgccgagtccactgccgcttctagctcttcatctgccgagtcgactgctgagtcgactgctgcttctagctccggtgctgaatccactgccgcttccagctccggtgctgccggtgcttcccccagtggctccagcagctctggctctggctccggctctagctctagctctagccccagctccagctctggttctggctcgtcctccagtgccagcgctagcgctagccccaccttcaacgcagctgcctctgtcgctgctacctacttgggacccgtgtccctcctgggtctggtgaccgccctgctccagctgtaaatgtcccttttgagcgctatgattttttgacgcatcattaatgacacgctcctcgaaagaggatacttggctggaccgggtatggtaatagttgatgggatgcgattgtaattttttctggctgtaccattttttttcccttttcgttgtccttggcgcccaaatgcctgcaacctatcctatttgttaggtggcccggatgtgttaattggcatcttccggtaactggcgattttctttgggcggacatcatgtatctatcagcgtcatacatactttgccatcgagcaaacatgcaataatatcaagtcaattgactttctcaagcactttaatcttttccattgtatacaatcgaatctagatctttcaccgcttgtttctggttgctgtatatcccttgactgttcatcccatcgtgctcggctaggttatgtacgttccaacaccaacaccagcatcacattcgcatcaatcatatgcataccggtcctcgcttccctcggcttagagtcccactatggtctaactgcggacgaacacctacagaatcccggaccctgggaaaatttgcaccccatgaaccgtggatcaggctgttgattgaacttgaattgtaatgggcctgattgtggattggctggtgatgaattgtgcctaggcgaaatgtctgtagtcggattggttggttgagtattgatgtatagccgaaccgtggttggcgcaatatcggatacattcgtttccaggggtttgggtttggtttaccggatttactatgttgtatgtatgtatgtacgatgtattgtatgtgtttgggtgtgaattgtatgttttacttcgtatatcgtagtaggtacaacatccttcgtaaaaaaaaaaacaatcgtaaatggtaaaatactgtcgtggctcgttattgcgtctaactcatctcatctcatgttctcggatagaaacgcccaaagtgcaaagaaaaaaaaaagtagtccaaatagcttgaagaaaacccttcaactgaaaactcgatcaactttcggaccctgacaaaaatccgggattctcctcagggtccccaacccccgtggagacctcaattcaccaagtggacccagccccagtcgcacgtcgcacatcctttaactggcgtgataaccgcaacaccgagtcagcaacaggacggtggtgcgtggccgcgaccctgagcaaggcaagagttgcggcgggccggggtgtagatgtgggttcggtggatgcggtagaggacacggcagacgatgacgactccgtcagtgcatctgcattggcatctgcatctcctgacgatcgcccccggaacaaatatgccccgaagggtcccagcgggagcgaatcgagtacggagtatagcctatcgctgctgctgtcctcagatgcagatcggtgattgtgcaatgttgaactccgccgttcttcgcgtgttacgatcccgtccaccgcttcgaggtggtcgtctattgttatgaatcgcgtgctgagggagtctgctttgctgcggatctgcgcgcgcagtcggtctagatactcttcgcgtcgtcgcagctgtatcgcgagtcgtgtgtctagagctgcggtgccgcttatttcggttgctggtcgggaggcgagcaggctgtcgattgcggagcgtaggtcggcgcggagagagtcgaattcccagactgctgtttggacggcttggttgctgccggtgaattcgagatccagcgcgttgcgggcgtctgggaaggttgttttcagttgcgattctaggtcagcgagcatgctttcgctttgtttgaggattgcggatagaggtgtgagggtttcgagggccgtgtcgaatatggattctagctggcgctgggcggttgcgagagtctcctctcggggtgttgtggatggagggtaggcgctgcgtggttggtatgcagggagggtgatgcagctgttggggtagagagtcttgatgcttgggatacggcagaggtctttggcttggtagactacctcggggagaactagcagatgcaagataaaggcgatcaacactgcgttgactgctttgcggacgagggcactatggccacgaaagatggatttgcatttcacgactaggcttgcttgtttggtgggggtcgtctctgcagacaaaccagcatctgcatctccagctttagtggtctggtcttgctctttctgctttacatcattcggcgtggacactttgcgtcgttttttcatgctttctgggccttgctgcatcggagtccgtacatattctacccaagacccgtctatgttaggtgcttcgcagatagagggcatgatgagctccgggcctgatatagtccatgatgatgaggatgtgggtgactctgctgacggattggccgtctttctggtcgctttgtcgctttcatgccggcgatttcgagttttggtggggtctttttccttcagagaaacagttgatgctatcacccaggattcgccaagagctgagcgatctggggtacgaggctgttctgtagacatggcgtaaacatttcagcaaggaaaatgcactttgtgtaatggttaatagttctgtagttaatatctcatgactcggagtgtttcaacgtatgtttgattgcgactggctcaatcagaccgcacgcgtaaagcggtggggaagaaagatcggagaaacgcggccgaggaattgagaaccttcagcaaccatgcgctcattacttcgcttgagaccgtccttgcctggcgttcgatctctgccatggcaatttgcacgatcgcgaccgctgtcatacacagcgattcgcgattgctcgtgttctgataaaccggaagctcccacgatacctcccaccgaccatcgagctattggaaccgcccaggagctcttcacatcttcagtctacagtcctggatctcctttattcctcccgaatggcacacatgttgtcaacaaactcatctccttcctccgcacacagtacctacaatatggcttccgtgaagtcctgactccgatcatctacaaaaagtcgctctgggagatatcgggccactggcagaactacaaggatgatatgtatgaggtgaccggccgaggagctagtggtgaggcagagggcgaagtgggtgaagacgaatcctacggactgaagccaatgaactgtcccggccactgcctactcttcaagtcgcagaatcactcctaccgcgacatgccagtgcgctatgcagacttcagcccgctgcaccgcaacgaagtgtccgggtcgctatctggcttgacgcgcctgaggcgtttccatcaggatgatggacatctgttctgtagaccgcagcagatcaaatcggagattgcatcggcgctgggatttgtggatatggctatgaagacatttggactcggtccgtatcgattggtgctgtcaaccagacccgaaacggattatattgggactttggaaatgtgggataatgctgagacgcaattgcgcgaagctctggatagcaccggacgcgaatgggcgctgaatgaaggcgatggtgcgttttacggccccaagatcgacatccagctccaggatcaagctggaaagtaccaccagctatcaactatccaattggacatgaacctgccacaacgatttgagctggaatatcaagttgcagagggggagccggactacaatccagccacgcccggagttgcaagaccagttatggttcaccgcgccattttcggctccttggagcggtttttggcgttgctgattgaacagcacggtggtcactggccattctggctttctccgcgccaggccattatcctgacggttaaccaagacgatgctgttgtgcgccgagctcaagaagcggccgccaagttcgctggtttccgcgcattgctgaatgatggtagcgccgagtcaccccgtccactgtcctctgtcgactctacgttcttggtggacatcgataccagcgcacagaccctgggcaagaagattcagcgcgccaaacagatgaagtacaacctcatcttcattctcggaccacgggacctggccgatggtggcatctccgttgatgttactgggcagatgaagagcaagacggataaaaatgctcagacattgcaggcgctgatcaaagccagactaggcgatgatgcgctgcagaatcctcgagctatcaagcttagtgtggacgaagttcatccgctattggtggaactcgagaagaactttgtgtaactttgtatgttgtataactatatgtgttgtcattttgagcgtgcctgactggatctttgccctatcattgtatattagaccgatcttttccgaatccaagtcatcattccacctgatgcacacaataattccaaacaatgcctgcggctatccgcggggtggatgcctcaggagacaccactccgatgttcgggcccctatggagacgggcacagtatgtagatattcgttgcatatgactgtcaaatgaagtaaagggaacataaatgatattaattgacattggcaatctgccagcggtatttcaatttcatcatcaagtcacttgcagatcttcacgccctgtggtcgacaatatacacatcacgtgactccgctgtcggcgccgaaaaactcggcgtcattgacgggcccatttgagtcacagcatattccccattcttaattggccttcttttctcttttgctataaaagattccccgtgtccatattttggaagccattttctgcttttaatcacatcaatatcgagtctgcttggctcagctataacgacaccctaccttttatcgtctcttatccacttgtgcccccgcggtgccccgccaacactatgccgatgtatgttgcgatgactccaattcggtgttcctacatactaatctcttgaaggctcaaggatccctcaaaaaagtacaagcccttcaagccggtgaatctgccaaatcgccaatggcccaataaaattattgacaagcctcctcgctggctggcaactgatctgcgtgatggcaaccagtctctgccggacccaatggtatgatatgatgtactgcgctcaatgctgtttcccatattgattggattggatctataggatggcgagcaaaaataccgtttcttcaagatgctcgtggatattggttacaaggaaatcgaagtgtccttcccttccgcatcccaaacggacttcgactttacccgccgtctggtagaagagcccggtctcacacccgatgatgtcgccctgcaggtcctggccccctgccgtgaggatctcatccgtcgcacagtcgactccctgaagggcgccaagaaggctatcctccacatctacctcgcaacgagcccctgtttccgtcgcataatcttcaacatggaccacaagcagagtctggagatggctgtcaaatgcacaaagtatgcccgctctatcaccaaggacgacccctcccaggccggcacagattggcaattcgagttctcccccgagactttctccgataccgagcccgagtacgccgtggaggtctgccaggctgtgaaggctgcctggggacccacggaggagaagcccatcatatttaacctgcccgccacggtagagatggccacccccaacgtctttgctgatcaggtcgagtacttctgcacaaacatgactgagcgcgagaagtttgttgtctcagtccacccgcataacgaccgtggctgcgctgttgccgccgctgaactggcacagatggctggtgccgatcgtgtagagggtactctgttcggcaacggtgagcgtaccggaaacgtggacctggttactctcgccctgaacctgtacacacaaggtgtctcgccaaacgtcgacttctcggacatcaactctgtcatcaaggtggtagaggagagcaacaagatcccagtcaacgagcgtgcaccatatggtggtcagctcgtggtgtgcgcattctctggaaggttcgttgtcctttctttttcctacgttattcgctttgctaacctatttcgaatccagtcaccaagatgcaatcaagaagggcttcaaactgcgccaagatggcgagggcgccgacgaggaaaccgagtgggaagtcccgtacctccccctggatccccaagatatcggccgtacctacgaggcagtcatccgtgtcaactcccaaagtggcaagggtggcgccgcctggattatcctgcgaagcctggagctggatctccctcgcgctctgcaggtcgagttcagcaagatcgtgcaggagaagaccgaggctgtcagccgggagctgaaacctaccgagatcgtcaacctcttcgaggaggcctaccacctcaagtcaaacccccgcttcacccttgtcgactacagcatcaccaccgaccgctcgcagtcccctgctcctcctgagcccggcaaggccctcaacaccaagaacctcaagcgtcgcttcaccggtattatcgagatcgacaatgttcagcatgccatcaccggtgtcggcccaggtgctatttcctccctggctaccgctctttctaccctcggtattgatctcgatgtccgcgactacaaggaacactccattggtcgcggtcgcgacaccaaggctgctacctacattcagtgcacagcagccggcagcaatcaacaggtgtggggtgttggtatccaccaggatgtggtccaggcctctctgattgcgctgcttagcgccgccagctcggtaagatctgttcctgatttgtctgcatctcaccactaacatgcgtttagttcctcacctcccgggctggttctcctgctcctttccgtcccatccgctccaacaccctcaccaacgaggacatcgaagctctcgagcagttgaccagcattccagaggctgttacatctaacggcggtctgagcgccaaggccaacatcgaacagctgacaaaaaaggctgaaaatttgtaaaaaaaagtttaagaaaagcaaccgactaaaagtgatagcgataatgtgaataccatgaacaatttgaatcaatattttcttcaaggattgctcttcagatgtaacattgacttagctgaatatagtagagttgaaattcgtggtcattggctagttatgcatatccaccgacattttcactcatgtcaagctataaaagaccagagacattcgagctcaccacccaaacaactcatccaaactccatcctctctttgcactggccccataagcattgaacgtctgcggcccctcagccgaaataatatacccattctcacaagacgagaacgagaccttcggctgattcgcgtagaaggtatcgaagcccgagtccagcgcatcagcaagactgttcactttaccggctgggtgtagctggcgccaggggtatcgacatgcgtcaccttcgcaggacttgagcactagcatgagtgcgtccaatcgcgctattatttgtggcagctcgcgatttgcaatcttgtagttggggtgtttggctgggtatgtgcctaggttcacggtttgatggggatcgctcttttttagagtgttaaggcttgttgaatatcctgtgggatagaaggggatggatggcttaccttcagatcgaagaactctttctcgtttgtgcaccatactgcatagtatagactatagtcgtcggcaaccagtcggatacccttgtatgtgtttctttggtagctgttatgtggctggtcgagtttgtcgctggcatacccgtagatcccttctggtactgcctatcttgatgttagctggttggttaatatgtgcttgctgtgtgaattactcactaatccccagtattcaatagcaacatgctccgtcctattgtctgccgtgctggcagcaatggtagtagggatagtcttaccgtccaatccgtctcgagtaacgccagctatgttcaagaaagtaggagctagatccgtatgagaagtgatagcatccagagtctgattctttccgataccagggcctcggacgatgagagggacgttgatatcagtttctatacgagttagcatatctatacaccatagacaatcaagacaatcaagaccaactcaccataaccacagttcttaccaggctgcatccgatgctggccgagatgatacccattatccgtcgaaaagaagatataagtattatccagctccccaaccttttccaacctctcaacaagcctcccaaccatctcatcaacagcctgcaaggcccgcagccgacaccgctggaactcatcaatataatcaacattcgtctgattcaactcaggcacattctgcacccagctaacggcattctcaatcagtgtattaaagctctcatcgcgcggcgcctgcacatcctcaaacaaacccgcatgccgcggcgcaaactccggctcaccgaaccagttcgcgttcctcgtggaatcatgagacccattcgagtgtggcgcgttgggcgctactgtcagcatccacggctgtttgtgcttaaccgcctcgtcgatgaaaccctctgctttttcggcgatcacgtctgtcgagtactgcccgtcgtacttgactggtgctgcgccgttgcgcgtcatccgtgcgtaccagtatcggtatgtgtacggatctaggaggaagtccgagccgttgaaccctcgtacgtacggattgttgtagttttcctctgtgtgtgcattccacatcttgcctacgtagtaggtgttgtagcctgcttcttgcatccatagtgggaggtagttgtcgttccagcctgctgagactacttttggatagccgccgtaggggagtccaacgtcggttacgttcgtgttgtgtggcatgcgaccggtccagaggttggctcgggatggacagcatagtgcgattgagcagaaatgtttggagtagcttgttccttgttgaacgagagtttccttgttaaagtgttagtctggggagggagaaagtagggcttgtatggaaggaatagacccacctgcaacttgggcatgtgctctaaaccgcccacatatttaccctgatcatctgttagaatgaagagaatattaggttgcttggcgacagctagagttgtcaagagcagcaatctcagtacgttcatcgctgcgaatttggcgttattgttgagcttgagagctgggaggatctatataaccccggcttagctctttggcttctgcaagccctgcgtcatggaagagacgtaaagagaccgaggagctgttgtgtgatttctccatataattgcatattgtcgatcatccgagtagaaatcgtaatgctgtacaacgtactccgtacatgatcggcatgtcagtgataggttggaagtaacagggaagtcgatcagtcggagtataaaaagatcggcgattgcgagcttgtgcacatcaatggtgttagggtgggtcgtatcctttagtctagtacatatgataacgatcaaccaaatcagaaatctgatctacaagcgtcagaaagatatactgggtatgtacaaattacaaacatagagctaaggtattgaggataagccggataaagaacaagcaatgctagggggaaaagaagatcagaactgtcaagcaaacacgccggccggcttttaaaaaggtatcatttccaatctgtacaatgtacgggctcaatccaagttcaagcctcgtagttgccgatttggcggtgcagaattgtcgctgtctgtgcggccaacgtcatgcccgtcttctgcgcctagtgccgactggtacatgagagcttcttggggccaatcattgaccccactgtcctgtgtgcttggacgtgccgtctcagcagggggtgtgctagcagcctgggggctgttggggttccatccctgttggctaggaagcggctctcgtcccgtcgagggccgttcatcgccagggtgtccatacgattgagactggtcagggttgtcggccatatcaaaactgaaccggaaatcacggtccacggcggacgtacccgcggtgggatccaacgtgttgtagtgttgatcatcaaactcggctacgaccgtggcagactgtggctccttgatgtgaggcacagcagagctaggcccggggataggagtggcaagaggactattgtcagtaacactccccagttcatacggcacagacccggcttggccggtctgataagtagccgcgggatgactggtctcttccaatgtcaccccacgtagagagcgagggacatttgcgtcgatatccggattcattgtggactgtcggatgctggtgcccatggtgcttccagccttggaaactctgctcatccggtgctgaggtatgtccgcaaatgggctatcgccctccaggtcgcgaatgctgaactgagcaatggttcgcagcttccgggttacccatgaggcgagaaccttgccgcgctgcttctcgcctagacgagagcgggggaagtcgccgtgggagacgaatgcgacaatatccgcaacgacttggtgctccatgaggataacatcaacaatgacggggaccagggccgctagataggcttttcgggtaacttcaacgacaacaacgaccaagccaccggcttggaaaatagcactgagaatgttagcctccaggtcagatctcaatagattatcatctacttaccatcctccattcacgatattgcggtggcaactctctacggagttttcaatgtccatagggaagtgattgagtccattgacttcaaaagtttcgccgatactgccgaggaggaagaggacttgcatatcaactggctggccgccaggaccgatcggccgagtaacggtgtgaaggaaaccaagatcaccagtacggacataaggcacgctggggtcaccgtctgcaactctgccgttcaaccgctcggagtcaaattcttgctttgatttgtagaagccctcagcgcaagcgtcggactggacccagatctcaccgtactctccaacgtgcgagagagtgcaggtctccgggttcacgatcgcaatctgtgtgttaactgggaccatgcccgaatcctgcagcaaaagcgcggtaggatcggcatcggggtctacggggtaaataagaccttgacggaggcttcgcaagtcgagccatagttcgatcggctcaatgcacatgtatgatcgtgtggtaaccatcgggttgagaacgtgcgagtaaatgacgttgatcgaggtacggtccaagctggcattggcgaaatgtaggcgtacctttccatctgtataatcggattagcttctcttcatggctctgatggtgacgacacatacagagatccgttctaggccgcccctctgcggaaatcatcaggttcttcagttcttgaagctggaagccttttccagccatagcactcattgcgtaatccaacatctgactggtggcgtaagtgtccttgatcttgtaccgagcaagtgttacgaagagagtcaatgggttttgagcgaaatcgactggtgaaactagatatgtaggcgcacctgaataatatgttagggtggagatgttcatagattagcagcaaacttaccgacgtaaatgcccatcaagcaggtgtggaggaatccgagacccagggtacttcgaacacttccaagcaccggccttgagcttgtcatttggcaggtttctttttgaaccttgcacatgcccattatggtttcatgggaaatttgcaccgagattcttcgctgatctggggtccaataagtccagaccatagcaggctggttaccctggagccaagtatccttcacagtgtagccgagctcgcgacatccgtgggactgcttcgagggctttgtggtattgtatatagcaggaacaccaatgcgaagaacctgggcggactgcttgatatgctgcgacacaagcttctgcctcatgacatggtcaacatcgttattgacaatgatggccttgatgttgaaatcgccgatgacgtgcaagaatgcaggagcatcctccgaaagacggttttgatcaataggagccatcgggatgacaacggcacccaagcacagacaagcatggacggcatagacgtactcttccgagtgggtgtacatcagcacgagatgatctcctggtcgcaccttcaccttgttcttgaggtaggtcgccaccgcagaaactttgaggtcaaacttcttccaggtgacgccttttccttcctttccacggctatcgatagagcagtaagccaattcttcagcttggcgagcgactcgccattgaagaaggtcgacgattgtgttaaagttgttcaatggggtggaagttcggtcatccatcactacatcgcgataatccacacccgaatattgcttttcctggtaggcaagcaagtcttgtcgtgatgctagagcagtgggggaccagattccaccctcaggatcaacaccgacgggcaggttcatcactgatcgttcaactccaaacttgacatgcactgcttgcagcataccgcactcgaaatctttgcgacagagcatgttgccaatttcttgtctgccattcttggtaacgcgcggcagactgttcggggctgtaagtagaacacagtatacccgtagatgatgctcttggtatagtacctccatacacctgtcggcgagcgaatcaagaagaaccgagtcgagctgccttggcggaccgccggaagttgttggcgccgttgaggccgagtaagactccaaaataatcacaggaagatgttcttcgttaacaaacacatcgaacgcagtacaatcatgaattttcggcaccttcttaagaatgctaactgttagatgttgaacgaagaagtatcgatgttccacaatctcttggccgtgctcaacccattcgactttttggcggagacgatcctcgtagagaccaagcacgaaaagtcggccctcaatcacacatccaagtagaccagtgcgcaggaattcaggttccacgagtatcggggtcgggttaggctcctcgaatttgtaggggcgagcgtggaatatggcctctgtgtgtttcggcaatgcccagaagccaccagaaagagagggtgaatcaacccaaatctccccaataacatttggcgtacaaaggagattggtctccggatcaacgacagcgagagttgcgtcaggaattgggtagccgaaagcgccaacgcgtacagcatgcggcatactgctggcatactttcgtgcatcctcgcccatggccagcacaaccacttcattgctcttcaatgcctctttgtctagaagcacctcgctaagctcgtttttagggctctgcttgatcgtagaaactcgtgatccaccacccagaagactgcttccgaagcccgttttagtctcaggcttggtaaggctctcgtcctctttcttataatcatcgcggccggctgggtccatttcatgggtcaaggaacatcccattcgctcttcaccaccgagccagtcacgcatactaatgaccatacctccatgctctggtaagcagagcatcggagccacaatttctctagcccgtgggttcctcattggccgaagccatctgtctgccaggatttcatggaactcagggtcgagagtaagtgtatcgatgagacagagtttgacgctgctgaaattaggctctgagtttttcttaaaatgtcttgtggccatcggatcttgctggtagttgtaggtggcgatcttcaagccagagtaatcggtcgccatgactgatgccttgtatttggtgatgagatgggcatataaaccgggtgtttccacagcccggtcctcgtgccaaacggttgtatggccaccgtaaacggtgaagagaatggccatgatcataccaattccttgtctcggatcgaggtaactgatgatcgtctctcccttagtgctatattgcctagcgcttgactccacaggaactgtagaaatgatcgcactcagacatgccatttgatgcatgatagtccggtggctcatcacaacaccacgcatatcacccgtcggggccctcgcaaactcaatataggccagatcggggacctgcagcgcaggtgtatcgtccttcttctttggatggaaactgccgaactcattcgtcttccaccactcgactcctcgtggccaactgagtttttgagctgtgatatcgcgttggaagttcttcaggttattctcagttgtcaatgccagatgtgcctgcgttgaggtgagcacaatatttagacttgtgtaatcatccagactgttgataggcacggcgacaactcctgcaataaagcagcccaagagcgcgacagcgaactcgataatttcagcttcgcggtagatgagagcgacacgatctccgcgatatagattactcttatcgcgaataacctgagcaactttctcggcgcgactagacagtttttcccacgttatcgatgcaacctccttgccctttgcatccagcacccaatatgctgcttgcttggggtgagcccgagcacgatgccgtaacaccgcgggcaggttgtcaaagttcgacatggggacatttttgtcgtgcggatcgttcaatgagaaaggaatctctcgaggttcgacgggaagtagatgctcaatagccggtccgtgctgaagttccgccccagcaggcatcaatggcggggccatgtttgctgttggcgaaaaggcttccccggactgagaatagcggtggaagccacctccatagctatccctataatcatcatgctgttgccccgcaaagtcggaaaagtagccctgttgggaatcaagcatcgtggactgtcgcgtgggcgctccagatgctggatcgtaatatgccatgccctcgtccgcgtactcaggttcggcgggggtatactcctgaggatattcctgggcgtactcctgagggtactcctgagggtactcctgagcgtactcgggctgagacatatattcgggctgagaatttggattgaacgcgtagttctgactcattaaagttgcggttctggaaccatcctggccttgtaaccctggggctgggggtttaggaaggaagagggagtcgtaagagctccctgaaggcgcgcggtcatgagcttggagcatgctttctctacgatgagatcctagcgatgcatgcgactgatcctgtgtatttataccggcaccttgatcatatccgacggctccgctgccctgtgagccatgactgcctgcgtaaatgggggaagtgacgtgtggcagggaagaatcggcagttggtgggcgaacgctcagaatggccggcgggacccttccagggctggttggggatgcatcgtagccaagaccggcctgtgaattgatatcaaggggcttgttgggaccgaaatattgcgaaagcaggatcgtacgtcgcttctggtatcttgtcgttgtcagtcctatgcatctgctggtccagaaatctctgtcgcaagaaccaaatctatgacaaggcacaattggcttgtaatactggttgtagccagggatagcttaccctttttgagtgatatcgccctcctgtcatggatcatacataagaaaaagcatacaacaagtgcacgagatgtacatacctccaattcccgatctaggtcccgcaaagcggcctgtatctcgggagactcttccgccatttagatggagggtcggaaagcctcaattcggggaaacgtatcaaaagcgcgggggagggatggggggcacggagtcaagaacacctcatcgcaatgagcgtctcgagggcgcagatgaggggtggcggatttgccaagtgcagccctgatagccgcaggttgtatttaccggggtgtgagtcgatcagcgagtcaatccgtcctgtctctgatcttcgcgcaagacacccgcgcaacgtcacccgccaaggcggtcagacgagccgagagcctgagacatgcgacggagagactatatatacccccagatatggttgtctcagatatatatagaaggtgacgagaaaattctacatctataccatcaagcctactgcatagagttccgatgaaagttgtggctgttcaggtactgtctgacttggtgtatcgcgtgtcccagtctaggctcggaactactgggaatgagacaccaagttacaccaatttggggctaggttcgtgtgttcagtggaggattttggcttaaattgaatagatgtaaatttgatatggaatcaaagcccaaaagtattcagtagaatcagtagacagtcagtgcgatcaatataaggctgggattatttgggtgtggatcgtcataaagtttccttcctcaggcactgaggcaccgaggcatgaatcaggtgatatccactatcagcctaccctaatcacatgacccccgcacaacctaagcgaggcacaccaatttctttcttggatacccggaacctcatcgacgttcaaccaccaaacgacaacccggtcaatttcccacgaacccctcccgcacagtcaacatgtccgacaacggggacgtcgaggtcgccgccttccctgtcctgcccaaggaggttctggccgagcagggcagcatcaagctgttcaacaagtggagctacgatgatgtcgagatccgggatatttccctgacgtgagtctttctatcaggtcctctatgcgccgagtgaattcctgttgtgtgcgagaaaagaacgagtcgaattggtggaatggcaagacttcgacaactggaagggggatatcgaaattctttatcggaggggacacaacacggcttggaactagttttcttttcgcacacagcaggaaatcaacagcgcgcacaaggaccggcaatcgcgcgactatcaggtttacagaggtgctgacccgccatgacagcgactacatccagatccgctcccccgtctacctctcccactctgccggtcgctatgccgccaagcgtttccgcaaggctcagtgccctatcatcgagcgtctcaccaactctctcatgatgaacggccgcaacaacggaaagaagcttctggccgttcgcatcgtcgcccacgctttcgagattgtatgtgccactccgaccaattcaaccattcaactatccaattcagacgctaattctcaattctacaggttcacatcatgaccgaccagaaccctctccaggttgccgttgacgccattgtcaactgcggtccccgtgaggactccacccgtatcggtagccagggtaccgtccgtcgccagggtatgtgaaaaagtcttgtctcgccatgtctggtatcaaatactaactcccttccagccgtcgatgtgtctcccctccgtcgcgtgaaccagtctatctctctgctcaccatcggtgctcgcgaggcctctttccgcaacatcaagagcattgctgagtgccttgctgaggagctgatcaacgccgccaagggttcttccaactcctacgctatcaagaagaaggatgagctcgagcgtgttgccaagagcaaccggtaaaggggttgtgttggatttgttctccgtttggtcctctgtctgcgtatactggagtggacggggttttaaccgggattcagtggattcgcatgcatctgcaaggctgtacataatgtgatacagtcaaggaggaagcacgatcttaaaagggaacgcattcggacggctttctttgtagttgtgatgcgatcatgaagaccttgggtcgtaaagacctatttcctaaaaagaaaaaatttcttttattctcgtttttgaatggatctagcaagtctagcatagagattgtagaagaatatacgatcaacatgatccaatgtcttaatgtttatgatttgatagttctagccaaatcagatattgccaaggttgagatttttcatcgcttatcgatacggcgaatacggagaaaaaaagtttcggacctccaacataccctccccaaccaccacattcttattttcaactccaaaaatggtgaaaagaaagctgggagccttggaaaaggtcgaggctgacctgtacgtaaatgtctgacccgatgcgccctgatcaattggtcagaggcttcagtccgtgatgctaacatcttttttttgcgattcgcaggcccaatttgcagcacaagattcgcagagatcctaagtaagttatatgcagagttccctatgctattttgtacacggtcggggattaattatcgctttgcttttcaggtcttatatcgaggattttcgcgcccaacattaccaatatgaatcccatcgtgagattttcatggcggcgcctacatctgctacggacaccggtctgatttctcttcgggatctcattgacttcatctctcatgtggccgactgttacccgggcatctgtaaggatttcccgcaacagctcattgatatgctcatgcagcaccacctggtattggagacagagttgcgggagaagctggttggaagtttagcgcttttgaagaagaaggatcttatagattcagcaaagtgcgaagaccctttcattacttccctactttcgatcctaaccactactctaggctacttcacactctcttccccatcctcatctctacacctagcaagaccctgcgggctctgctcttccaaaagatcctctctgagctacgaaccgcaaatgcaaagaccactaaccacaagttgaaccggactatgcaaacagttctattcaacttggtcacatcagaccgcacatcggctaaaggcctgtgggcgatcaagatcaccagagagctatggaagcgccaaatctggacggaggctaaggccgttgagatcatgaaggaggcagctttgtcacaaaatgagaaggtcatcatcggtggagtccgtttcttcctcggtggcgataaggagcgcgaggaattagaggacgaagacagtgaagaagaagtcagtgttggccaggttaagcatcaacttaccatcaataagaagacccgaaagaaggcccgtgtcgccgaaaaggccatcaaagcggtcaggaacaaggagcgcaagaagggaaatcccaatcctctcaacttctccgcgcttcatttgcttcacgatccccagggattcgcggataacatgttcttcaagcatctccagaacagcaagtctaagttgaatctggagcaaaagcttcaggtgctacagctggtctctcgcctggtcggcttgcacaagttgcacatcatgccgctctactcttacttccaaaaataccttacgccccgccaaccttctgtgacttcattcctggcatctctagcccaagcctcgcacgacttggtgcctcctgatgttctcgagcctctgattcagaagattgcaaatgagttcgtgtccgaagcatctgccggtgaagtcgccacggctggtctgaatgccatccgtgaaatttgtgctagacagcctttggctattgatgagaccctgttgcaggatctcgtcatgtacaagaagagtaaggataagggtgtcatgatggcctccaagggtctcctcagtctgtaccgtgatgttggtgcgcagatgctgaagaagcgtgaccgtggcaaggaggcctcgatgagtttacgtgctggtgagagaccagagagacgttacggtcagcaggaggccggcgaaattgagggtctggaactcttggctaagtggaaagatgaggagcgtcgcaagaagaacatcgagaatggccttccatctgatgcggaagataacgaagaggagaacgacgaggccgactgggcagcctggaacgtcgaagaggacgaggacagcgatgtcgacggagaatggatcaatgtggaggaagatgttgacattgtactgagtgattccgaggatgaaggcaagccggcatcaaagaaggccaaacaggacgaagagaccaagaaggacaccgaaaaagaagccgaaaaacccattgatttcatgaaactggccaccacccgcatcctcaccccagctgatctcgccaaacttacggagcttcgtgctcaggccgcagccgaagccactcttccgggcaacaagggccgcgtcgctgccccatggacctcccgccataccgatgacccattgaccgctggtgagattgagggtcttgctgctctatctgccgccagggccactcgtgaggaacgtattgcccacgccaaggagggcaagactgagcatatgagtaaggaggctcgtcgcaaggaacgcaaggtggagcaaggaaagagttctaccaacaaggaaaaggctcgcaagaagaacttcctcatgacgttgggcaaggcgcgcagcaagaacaagagaagtttggtggagacccgtgctgtgcttcgggctcacgtcgatcgtggcaagagaggcggacggagaggaaacgttggccagtgataggctttttatgtccgtttttcttaaaaataatgatttgttatatacagtacattacttttgtcattgcacgaggctcacaggatagaccataaagagcatatactaccttatgacagccataaccctatcaatgattatactccatcgtataaagtaaagattaattaaaggtgctcgattggttccacgacgcgatattagtgggggtactatgcgttgatcaacgcgtaccgcgttaagtggcgtccccgttgcctgagcagcctcgtccttttttctttttcttcccttttcccactacactacgtcactcactcgtgggcattttgagaatactcccatattgaaatcgaaaaccgcatatcccttttccaacatggcacccagcaatagcgacttgtcaaagcgacgacgcttccaacctcctatcacaacgttcttcacatccgcctcggaaccagtgtcttcagctacacctgcggtgtcacaccaccaccattacgccgcagcaacattctctgcccacccggttgtgcctgccaaatttcagtcatcgcttctgtctgtcggaatgcgggttcggaaatccgtcgcagacggttatagaaccaacatgtccaagacagaagaaaaggccccactctcgacagctgtcggtcaaaccccgcgtgctcaaccctaccacggcagcagatactctgagctgtcacctttttccggcactggtaaatcctccagccacgatgactccctcgttaccgacgatggcgacgcatactcgatcccatcaagcagccaagactcggctgtgtcatttgccttgggcggtcaaaagcgggctttggaattagatggtgacattctggtcgatgaggatgttgatgaatcatccaacaatttcggatcctggaacgagaactcatgcggacgaaccatcctgtctccgaatttgggccaaagtcgccgtatccttgctgtgcgacacagcaagattgaacagcccattatggacatggatgacttcgaggaggctacgttcctccgccgccgtgaggaagttgacgcagaggatgtgcggatgtacggcgcttgaactgttagtttgtgcttctcatttcacttcccctacgagcccttccatggcatggcctactatcttcttgtttatccttgttgggtctggaatcggcttggtttcttttaccagacttgtattatacccactgttgttctatgttgtaccatattgtcttgtacatttatctttttccatctgcagagcagcgaatgtgacttattacgaatattagttcatactgtcacgtttgtaatcaactctagggtccagggagcacctgggaactattaatatcaggcatcaccgtcagtatggacttgcactgagattaagactaaatttaataatatacaaaaataacgcaaccagacaatgagactgagaaacatcttgtataagaggaacggccaccaaatgtaggatgtatccctacatcccgagttgtaatcccattattccaagtcaccaatgtcgcaatcttgcccagtatacacgcatcttcaaaaatctcgatattcgaggtggaggatgattatctgataacatcgaaatggtactcttcctgcgagtacgatagttgtcatattcgagaacggtaatggtacccttcaaggtagcgccaaatttagcatcaatgtcgtcaaactgccctgactcaatatccggatattcttccatctcttgcttgggcgaatgctgatgtattcgatatcgaacgagaggatttatccaagtgtcactggaggccatggtttgtgtgtataggtgtgttagagatatgaaagtgtgagaagagagaagagaagtaccaatattatgaagatacatccatatatgtactagtagctactagacttttgtttgccgattttgctcacggagtacacaaaagtatattatctcgtggtccatgggttatgcatagggtttcacttccattccaaggtaattgtatgtattttgctacatttaagtagttattaactaagatgcagaattggagccagttatatattcctaatacggagagccaatattcaattattgcagaatagcacagttagcaaaacactcatgcttctaattccaagctcatggccctgcaattactcaccagtcgactgagtcagaccccgcccacgccattgccattgcgactgaataatagttctcaaaagggaaatcaaatattgattggctacatgcatctgggaccggtgggttatgattggtagagatgagtacgtcatctgtgaggctctcgtctgggtccgctagtcccaaagaggatgccaatatgtgagcccccggactccagggctacagtgttccaaatattttatgtggtttcactatatagcgaggtagtcacacttaagagccttgcagcgggggtccgagtcgttgattttctggcaaaattagcgggccattgaaaaagagttacctgacaaaccaagccacaacccaggataactaacttacaacattcgcaatcatggacctttgaagatccacacaaggggcctgtagagatgttcgttaggtacattttgtgccagccgattggcctagagatgcctactctctgtattagatagttacctatcttaatgctcactggtattcaagctcgcttttgttaatcattatattcccgtttgataagaataggccttttaatacagaggtacgtacttatttcatccaaggaagagtagtgaatataatctacccaataaacgttggacaaagcctattagataccgcaatccaactttctgttgtcctaagccgactagagccagacctaggaatcgcatggaagtaggagacaagtcagttagaaccttggaagttagaggggagtagaagtacggagtagagcaagcgagagccctggaaattgaatatgtttgccttctaaagttgaagtcttcagaaggaaagagcgtggagattgtttaccgcctggtgactgtgtataagaaactcttaccactttcgcactttcgaaatccatcagacttacatacatatctcatcgacaagggttgagaggtaaggaaggtaggcagtcctggaaaacatatcatgtgatgtgaacatacgatgacatatgtctgtacgcataatggtcgatagatgtatcgagtctaaagtagtaatagctgtagtagccagattcttccaaggttagattcaaggcctgattatctaagcatcaaaatgacctcggcttcgcacagccacagtgccacagccacagtttctgatctgctttgaccgtaaaccgtggaagtatcgaagacccgcaattgtttcaggtccaaaaataacattgaatgacaatcagatctcagtactgccagaacccctcgctcaatggaatcgatgtggtcgcatcttaacagtgtcaaccatcaactcatccacctccttggctccatgaaaacccaacatggcaccaaccactaaacccaaagttcgcaaacgcaagccacgtgcgagaaagaagaatcgtggtgtccgcactcgcgaaggccatgcacgtccgatagacgcaggctcgccggcccaaccgcttgccgaagtactcaacgagaagacaaagcgtcgcaaacccaagaaaacatgggccgcactcattcctgtctccgatgatcccctcgaaagggtaagtttgagctgtattgatatagaaggatatcacgctaaacattgaatcagaatattgttgagcaagtacctttgccagatgggtacgttctagtccccaagggtgatgtatacatcactcgacactgccgcagtaagaccaaagagtccgagcgaatagtatatgtcgtctacgtaagcgctcattcgaaccatcagtttcaagcccagagaaggaccgctaacagccccagaaccgcacgggcaaaagaactctgggaatccgagtgcccgaagaaatctatacagaagttcttgaatcagccgccgcaacaaaagaatcacgcgccaacgccgtgcaagtgcgtgacgctaaggatctctccaaatcccgagaactcttgaagagtgaattcccgcttatgcccaaggaaaccctcaaaatcgtcctggaacatgccttcctcaagggatcggggcgtgtagggcggacagggatgatcagcgacgatcgaaagacgctattggctgtggaggcgcatattcgacatgttcatacgccgtatgagaagttgcttgaggagggcgtcagtcggaaggatgctcgtgagcaggtctggcctactatccaggccgttgagcggacttggcaggggtgtgagaagaggaagactacattggctttgcgtccggttgacaagtaagggttgcattttgttttggtgggattgaatgggaattgcattgctggagtttgttgtggagttattgaggctatgaaactatgagactatagtgtttgggatcactcgaaattcactgattactctattctaaccagtagcctaggtacagtagataaatatttgaggcctatatgatctacaggtgaaagcaaaatcactaagaatatcatttgtggctatccgtatgtaagaacgcggaggagaagcaggagcaaatccccatcccacttctcaccccaaaaagcttatgggtctcattgacccagtcacacagcctcaatctagaggcgtggaccacggaggaacttcacctcgaaatgcgggtggcggtaaggcagacccgagaaccagccgaagccgtcccgtatcatgtcctgcatgatacccattcgaagatcagcacgagcgagtgcctgatcacggctcgcctgacccgtatcaatacggatgtagagatgcggaccagctcgctcaggcagggactccagaactggcagtcccgctctctgaagacgagtcacttcagcgcgagcgacggtcagcacgtcgaggtccagagttggcataggacggggcccaatggagaggtaaaacttttggcggtgcatgccactgttctgagcctgctcgtttatgcgagtcagggtggtggttggtgcaggctgagcctgttggggaggagggctgccgatctccattggatcaatgtccattggatcgggcgcgggctcagattggtcttcacttgtaaaagtggcaaagcggctgctggccatgccaggtcggatagggttgcgaaatgaggtagcttggtgggcgtttgttgcgtccggtcgtcctgtggaatgccctcgggcttgcctgatttgtctggcaacttgtcttgagagtgcacccgtggcgctgctttggtcgttgttgtttgccatagtgctaaataatactgtcagtttatgcttgtctcatattttgctgattggaggtcagacatacgattgtagggcttggtatctctgtggaagagaaggcatatgggttggtacacatgatgataaaggcgaaccacagtcacaaagagatcagagaccatctaaacgagctcaaaagtactgtttctaagctcttgtggcacgtgatttcgaagctcgaagagtttacatgttttgggtgttgaagatgggagaatcgaggattctcaattcaaccagtactgtttgctattaaaagaattgaaagaacgaaagaataaactaaatagtaatagttattggcttcacgcgtttctaaatgtattatccaaataattaaattcgttgacacttagatgtatagaagcacgactatgttgtagccaagcttttctggactctcgtgccttatcggtttatagttcctgattgggagtgccaagacatacacgggcggtcagccccacatgcaaacaatcagggaacaaggtcgacggtgcaaatgttctctctttcttagaattggacatggatctggaatcacagacaacagacaagcattcaaatatctttacaaagtcctctttacctcaatctccccaaatatcgcaattaacaccagtgaaccccccaaactcagtttccagggtccatcgcagttacaccaatcaggcaaaaccaatgaaatgagaccttcccggggtctgtttgggggcttagactgatagcccaaagaaaattcacccctcaacggtctcttatttgtcatggctagtcctctcaccactcaccatgagaaatcgcgtgtttctggggtttccaaaccggcataaatatgccctggtggctgcgattctaactctatttattcttttcaagtctgtgcccacatccaagctcgatccccacaccaagaagctgtacggggaggaccgaccgcggtatcttcaccagtctacatttcgcaagaacccagaccatgactacgagctcaagctctctaatgcgcttcgcgccatggagatagaaagggaaatgcgacacgatgaggatgcaacacatacactgtggcagattatgctaccaggagtcagccagcgaagcgacgattcaattcaattcgaggaaaagaattcagaatggaaatacaaagtaagaccgacaacagacaattcatatcttgattataccaggtcaaccgactaactttacaatttacagctgatagaagccgactgggctgacaaattcattttcgacactctggaatccatcccagacatcgctcgactctacaaatcatacccacactccgtccaccgcggcgatctcctccgctatttgattctatggtactacggcggctactacgcagacctcgacatatatcccgcacgaagcatcaaatcatgcccgtcactgcgcgactccatcttcaaagccaacacggttaacgcgaatgtgtcgctagttgtcggaattgaaatcgacgagccattcgcttcgccgcagaagatgcgcgactggcactgggcccgacgctacggcttcatccaatactcaatttatgcgccacaacggtttagtccgctactaagagagatcatcgtccgtgtgttgtcccatacgaagcagcgagtcgacgagggtcatttctggaataggagatacaacgaaatggatacgatggagatcaccggccccggcgtgtttacagatgctattctcgatgtgctgtcggatacattgccatctacacatcggttagtacaacagtctgtggatgcggacgctgggttctcgtcctcggcttcgtctgtgcagcgtgtgacgtgggcgcctttccacgggattcaagagccgctctgtgttgagagttcagagactcagcctggcaagctaatgggagggctgtgtgttctacctgttaacgcttggggtaatggacagcggcattctggatccgagggcttcagtagtcaacaagcttgtattaaccatcggtttggggggacttggaagccttggaaacagagctggcggaagtatctctttggctgagaggatatgattttaatgtttacatctggtgttccggggtgtacaggtcatggcgttttatggtatcttcctgattaatgctaccaatgtctttgtttctaatattgatatcccatagactgtgttcttaattggaatactattcaagttaaaacaaacttgattcctttattgcaagttgatatatcgaagttaacttctaacctgctcttataaaggtgggctggaagagcgaagaacaagtgaagaacaagtgaggaataagtgagtgatacctcagatctactaggtaccagctctggggtagtgtttactttgagataaatactttaataatggcagtgaattggaagaagcctggaaccacctagcaaacatttatgtccctctatattaacccactcattcccccgtcgcttttcccctgaacatcctctctcctcgttctcgcaagtggcaactgtcaatcccacagcatcaacattgcatccaatttttcgggaatgcccccaaatcagtcgaccccgatcccctctgatatcacgcaatggaaaaaagcagccaagagagcagaggccacattgaggacgagcatccacaccagagacccgttcaaatcaggctcttaagatattcgaagaggaatttctgcttctgagattacaaccaacagcaacgggtgaaccaattaccgtacttggtacctacgagtgaggagagggcctatgacaagaatgaggagcttgtgaatgcttcacttgtcattttcttacaagcagtctgcgcgaagcactccgatgtggatagtgacaggaatcagcgtggtctgaatcattgactaaattgaagcaagatgttttattctggccgaactagtcagaccaggaggtcaaagtcgcattaaccataagaatcgctcggagggggaagacgactgtcaccattgaagaatgggcagtcgacattggagaatgttcccccactcctacatcaccctaagcccgccaaacccttacgttgagaggtgaaggccagacattatttcccgcgcgcttccaatgctaatttcatatgaagcagtgtgaagttgcttaccttagtaaggcctcaagttaccacgccaaaattcgatttcaagaaggtcaagaatgacgaggaaaacggagagcttagatcggacatcttcagcttgtcatgccaggtagacggcttcctgaagtcgaagtcaacctttcgagcacaatcaatcctcgaagcgaaagctctaatgcgtgacaatcatgaactgaatgtctattggcaggagactatggaactggttacagccctgttaaatgcgcatcccttcccaaggacaggtaagcctatgcagtgatatcactgtatttgagtctctatactgatataactattagggtgacgctcttttctcagactggatctgagctgtacctgctcaacgcctcttacaaggacgggtatagacaatacatgcagggtgatccgggaaagcgctccttgaagcaagacagacttttcgcattgggataatatcgaatgagtctcgtttcgcctatatggtccatatcttatcactgaaaagacatacttctggtactttgccaggctagccctggccgtcgctctccgtgcaagcgaagaggaggatgcaaggacctaggggttcaaggacgccctcgcctctgctgcgagcgctggttctgctgccggcactggtgagtatcccacgacatattaatgttgtctatccctatataccagaagcaatactaatatcttccaaatagactcctcctatcacctcttccgccgattcccccagctatagctactccaatagtagctcttcctatcgtgtccccctccgcgtccagtaagttgaataccctcgcattccaaattccgagcccttcctccgccagtctcttgagaggaagcatctccactacagcggcagtcgaccaatataggccaactccctgtcatattcttttggcttgcaagttctgttaaggggtgacgctaatatttgaataaaaatagacagtactgccttgattgtcctcaccgtgggcctcgcccaccagatgacactcgcatcgttgattccgagattcccactaagtgaccaagaggcggaggaactagctagcttcctccccgagatcattaagaactttgttgatgaacggcggcttggccgaggactcgaagcatgggctctgtagccactattagctattttctttgaagatcattgaattctacatttttttttactcctcattgaagtaaagcctggttcaatgccataggaaaaattaggtgatcttgtcaggcaccaacttgaattactggtcaatcttcaacagttttacttttaacatcctgggacctggcagagaagctcacagtccccaataagtgcatttcaactaaaatacgaagtatagagagacagaggagcaaagaaaaacaagggactttggctatagtactaaagtcaatcgccttgtcattatagctgcactgctacccctaaactctttgggtatcaaatcggtaagcaagacaaaaacgaccttgtccccggcgagtatatcatataccttgtatgggaaaaattgcggggagattctcttagctcttaggagttctggagttctggagccttccctatcacacaattccacagtgtgatccaaggtcatttactagggtttaggcagtttatcaaggatgctccctggcttgaggaccactgcggatgctaccactcgctggaaggagacgttccttcgtattataataagtagtaatagtgaattgtggacacacgaatgaatattgatttctttgcctaggcccacaaatcctagggtacctccaaggtaaccctacggtcctggatgaaggtagcaataaaactgggtaaatacccagacaggtcttctacttcctcgtccgttaattccaacccggggaccaacgaagcaggagtgatacggtaggcagctcccaccgtggggactactgcactagtggtgcctatatttattcgaatattagcattgctcctcagcaagacctgcagtcgattttctactggagatgagatgcttcctcctaagcgaacaacggaggaaggggtcataatttagaatgcgagggtatacaacttactggccatggagggggacacggcaggaggatctactactggattcgtgatggccgggggaggtgcctgcgaggcaacagtatgggagtcggtcgaaggggaggcgacaggaggagcagtggaggattctccttagaatgtattagtattgcttctggtatatagggatagacaacattaatatgtcgtgggatactcaccagtgccggcagcagaaccagcgctcgcagcagaggcgagggcgtctttaagctctttggcggctagatgtactattagtacctctcattctcttgatactggccgcggcagacagagctcttacctttctccctcgaaagtattgctgtatttatgggtaagctttctgtccaactcgagtggtctcagccatgataatgtgagactaacctctgatcttttttcctcctcgggggcgctaacgctttcccacttttttgaactgtacgcatcaatgtatctccccatcattaaatcatctcaaagattgagtgcttacagtggtaggggcattggggccattggagacgctgggagcactgggagcgctggaggcgctgggggcagtggcctggcacggttgtcagtgttcattcacatattgagtgaggacatgggatgaccacacgacatggtcatcaataaagatgagacttacgggagtctttcttttctgagacatggcgatggcgagtagaaggaagatgataagatgataagatgataggagaataggagaagagggaaaaaaggaaaggaaagggaaagagccccagggggaacataggcaggagcactacacgtcttccttatctacgaacttcagtttatctgacgtcttgcacgacattaccttcaccttcccttttgggaaggaccgtgaagattctctccaccagtactaatacctccctctcccacgacgctcgctaacggactcgatcctctcgacctaatgtccgaacgaacgaactgcgaatgatatgttggagtggaggtacactacaatggtcgattgcttgagagcatacccgccgtagagccttgctaagtatgatcattgcttgctgcgcaatacagctcagctccagaaagaggtccgtgtctaggtataggaacactaggtagatctagctagatacgttgattggtcggtgttatgagtgttgcttgaagaatgatgtgctcccttgtagagccggcttttcattctaagtgacatgcagatcgcctacgattgatctcctcacagctaatcttcacgaattttcgaatatcataatcgtacgcttggactttagaacattgaggctcgctcatgtaggaatctagcgtaattgagtacttattaggagggcgctttaggttcgcaatattgcgcaataggattaacgttgtctttgtattaccagggaaccatttctaatctaatagccagaaatcatttttcagggtcaaggttttctttgtccaagccggagggagagcttgatgctgaacgcgaggagatggcgactgctcttcaaccagaacaggctctatttctggaccatctcgggggttgcaattgttgtagcgaacgaaaagctccatctttccatcgctatctacaaaattgtagatcggcgaggatcggacaagtaaggtaccggaattgtcgaactttgcttgtaggagacggccgtgccttggcccaaagagcgagatgacgagaactgggaagaatgaggtatctccgaattctggctgttcgagacggcagtagagggtgtttgcaatagacgctaactcgctatgttgtagttcattttctttagcctttgtaccagtgagagtcacaagtttgatgtgagggcgagtggtcttcggatccttaaaatcgtcaagccattggcggatagaatgggcggtccatctcggaacatcccgaggctttgaatgtccagctttaacaccgcataacattcctgttggagtatcgttgaaagaattttcagccctaatagcctatgttagcgacgtagtcattaagaatagaacgagactcacttgatattattccaatgcgaaaggtcctgtatcgaggaggtcgatcttcccctcttcctcttcctccccccctcctccctcccgtcctccctctcagcccgtgactcaaagacttcaagatagaaggcaatttgaccagctctctcccacatgaggcaatcctcgggaacatcgcctgtaacatcagcaaagtgtccttgaattcgttgatatagtgatacccgtccctaggaagtgcttctttgtccattttgaatgtttcaagctcttcatgggtaagtggccggaagagacaagcctccgaatcggtgaatgtgtgatcctctggatcgatagactggacggagactcggaattgagctagctcagtatacgtgtaggtaggcttagactgagactggagcttatagacgatggaccgcactgctttcttgtacttgtctcttaggtgagcgcgttcctgcggatcaaccaaggaagaagccatggtggataataaggaagaaagggtaataatgttgcaacgtagagacagaaagatgattttgggggcaatgagtacgaaagaggagaactgattgcatcacaattgatgccctaaaactttaagttttagagagggaaaggatttcacgtgccagatctttaagagagaagaatgcattcaatacagaataactaagatggagagaaagaagaagcaagttgcaaagtgggaagcagtctatagaatacccgcaccgaaggtattctaaaagaccccggtcttgccaaagtccggatttttcctccgtcaagaacaagacaagaccgaagcccgccactctttcaggaataagaggcaaaccgacaagaatctaggttgctccgtcaaggacaaggcaaagccgaagctcgccaccctatcgagaatatactaacaacaagtgactccgtgaaggacaagacgagccgaagctcaccaccctttcaggaatagaccatctcatcaccccttcaggaacaagacaaagccaaagctcgccactccttcaatggaaagacaaagacaatcacaaatcgccttcttcgattaaggaactgagatttcccctaaaaggcaaagtttgcaactttttgggtgagactgaccgggtgggagatcgaggagacacattctatcaaagcatgcactctcgtttgacgggtgatcgcgaccctgatgggactgaaaaggacccaccgtcagaatcgtcaccactgtcatcatcctcatctgctcctccctgcatcgcagcaatgcgggagaggtgccatctcagctccaaaagttccatcgaaggcaatggttgtttctccttgtcgttagttctcaccgtgaagacatgccctgagctaattacttccaaagtttccatatcgaaaaagtaattaaatctcccggggctcctggacggtggagttcctggacccatgtctcggactgcggcaggcggcattcggtcattcctagcgatggtggcgcttcggaaaggaagccaatgaaatgcgattcgcatttcagtttcttcttcgttgaccgaaattggccggaatgcaatgagtccgcggtcccattgatcgtgagctgtgagatccagcgtgatcaggttgcatacccgctcagtgctcactagcacaccacctggcatcagggcttgctcccatgcatcgaccttttcttcggaccagaaggtgcgaagaaagttccagacgctgtttccatcatgctcgtcccgcgtggtcccattgatcctattcggtataatatgggctacctcaagcgatggtcctccacggcgggtcagaacgcatctagcctcctcacgatctgtcactgtcaccctaatgctttcctcggtctagaaatcaaagagatcagcagtgttccataataaatactcctgacaaactcactgggtcaccaagtatcctctttcgccgaccactggcctggggaaccgggattctgggctctgaccgtaaacgagcggcggtactggcttgtgccggagagccagatctaccactatcaccacgttcagggcgtcggctcgagatgtcagcagcggcactcctctcgccgcgtgcgcccatatcgggtctggtttccagtaccctgggttggccagagcgagatgcttgtccatcactggcccctaaataaatgacagatattagttcagtgatataagggcagggcagacctcgtgaatacgcacaaattctcggaagattgtattgggagaaatcaaccagcatgtatcgaagcatgtgtgggttccgctcgtggcctacaaggacctccagggccttgatgtcagcgaaccatagacccagcgccttcacgcgtgggatcctgtggttgccgacagcgacacagatacgatcaatcaacgatcgtcggtggggatccgaaaattcggaaaaaatggtttgagtatcgttgttcatattatgtgattacgaaaagatgagagagaagagagagaagagaagagagagagagagttgaggggaacttctaaggttgaaagctactgcccgtttgggcgtcggggtgtatctatggatgggaaagaacacagtcgttctttccacttcactccacccttccctccatttacccaaagtatacaagaagaggagccttgagatatggcttttgttcaaggaaccagaagttggtcccttcaatccattgattttaaaagaagaggtagtctaagtcaggcatttcaggaatcgctagccacgtttttatatcgtgcacactcctctggcttgttgttccaagtcggcttgcatagcctttcgcgataatctcactattgacttgagtacgtttctctctatgatgtaatttggatctcctgggctctcatacttacagacaccgtgatgatctgcatttaaagcccagaacagaagaatccttttccaaaatcatctttttcaatcagtaaattccatgcggcgtataagaagatttgaagtatatcttaccacacgagcacttttgagcctgagaaaagtgggctaggttttataaaataaaacgaggtctagctttagggcgatatatcgggactgcttattaagcttttgtcgagtaacttagttttccaatgcggatgcctgtatcctgccttatttgactggcgcattttgagcaatttcatttgaattcacaggggacacaggtgactctcctggttcttgattccggaccatttcggaggtgaggggtggatatagtcctggggcttgggatgcggctcaacagtggcacatcgatgtacggagtcgatatggaccgtaccaaaggggtctgtaaggagcagactgggcgccattaatattaagcaatattgtgccgccatttcatctcttggcatttggccctcattgataaacagcctacatgaggctatacttgagaaagggatgatcgtcgctccaaagcgcttcaagagtcttttccttcggggtatttcggacatttaatccgaatggataatcttggagcggtgagagagatatgtagaaggttagcttcctacaaacgatcgagatctgagtctctcgaagctgatgacgaagatgattttgattacgacgctgctattgctagtctagcatctagggactagatggaatttcgcgcgggggatatgttacgatcgctatgtttgtttgcatgtttgttgtttgcagagtgccggctatataagcaggccctctcccacttctgcacttgcttcttacttctttccttctctttatcttagttattttgaattgatgcactctatgagagagaagagaaagagttattaaaagagtcttcggcccaatagcctattagtaatatcgtaatcaagtaactatagaacgagacttacttaatataacgccaatgcgaaaagtcctgtatggaggaggtcgatctccccctcttcctatcagctctcgtccacatctgggaatcctcaggaatcctatctgtcacgtcataaaacgtatcctcgaatttcttgatacagcgagactcgacctcagaaagtgcttctctatccattttgaatgtttcgaagctcttcatgggtaagtggctggaagaaacaagtttcggaatctatgaatgtatgatcttccgggtcgatagattggacggacactcggaactgagcgagctcagtgtacgtgtaggtaggcttagaccgagacttgagcttatggataagggattccactgcttccttgtacttgtctcttaggcgagcgcgctcttgcaggtcaatagatgaagccatagtgaatgataagaaagaaagggtgatattgtagagacagaaagacttgaatgatgaaagactgatgaaagagagttagctactaagcctaattaggaagtcgtagctccgaatataatgagcccgctcaataaaagtatagtcaaaagtgatatacatttaaatcctctagctataaaaatgaggagggaaaaacgatatctgaaaagacaataacatatgttgtactttggaaccacgcactgtgatagtaatgtgcagggacgcgctaaaccagaacaggcacgctaagctcttttgggcaattcaccgtccgagtgtacggagtacggagtatacaatatagacaacaagagtcaaagccagtctgagtatagggaagaacatggagtagctgatataatcttcgggcacaaagagataccaggaaggtttgctagggggtttagctctccaaaccctaattcacccttgaacacgtcggacctccccctttcatccatgaggtggttctcaaagtgggatatcccaatattacattctgatattctgatattctaaagctatgaagctctaagctccaatatcgaccccatagaaagtacaaagatatgtatcatatccggagtctccacatcttacatgtcgtcattggtgagattggtctttgatcctaaacagagctggaccggcatccccgacggctcaatctcgcccaggcttgctattataggtcgagatcggcaaggggagagtctgactttgaccttccaaggcgctggatgtatgaacatgatatatgagatgattcacattcttttgttcctgcatgaagcacaacatacattgtattccatactccctggacttcgaatggaacatcgaagctgtggatcagtggattctaatgaaaaaatttaataaattcgagtctccacgtaaagaaagaaaaagaaaagaagaaaaaggaataaaaggaaaaacgaaatttcttccctgaaagaaaaaaaaaggaatccgacaaacagagcaaatcccaaaaaacaccttcgctcccctccgactctccttccgatatcatttcccttactctttgccaacctacccaacacacaatatgaattaactccaatgatcctatctgctgtccccaattcctgtcattctcaatcaattaaggttgcctggcagcttgatcttcaatggttactgggtctgtgttgctgacatgagttgggatcaccctgtccacaggtatgcattctcccttgatgacacccccttgtgggggtatcacattgtagtcctctattctttttatttttacaattctgtactgtatgcctatgtgacaaaaccgctcatggattcatttatgtttagcttcagctatcccaacggtgaacctcaaactccgacgaggactccgaataccttcgactcgtttcacaccccgaaactcgaatccagcttttttgacccccgggtgacttgggatacctccgatccttatgcttccagcccggagctcctccgcacgccgcagaagtttggtctaggctcgaattcactgaaaggtcacaatggggagactactggttacagggggaggtcctcggaccagaccgatacggccagacggattcgcccggtgaagcctctgccgagtatgggcgaggattaccctcggacaacgggatcggccaagtcagcagcctcgatgcaaaccccgccgccgacaagtgcatctagacgaaaagtccccgagttggatcaccccgatggacagacacaaggagaaacgccgggcatgggaggtcatttggaaacacccagtcgtcttcttggagcatctcctcggatgtttggcaacctccaatcctcgcccgatttgtttcagctggcttcattggatcccactggctcgcctttcttcccacagcaacgactgttctgggatcatgatctagaaaatacgagtgaggttcctttgcccagcaacgggaacaatctcaatgctcgtcagacttccgtttacccacaacacatcccccaattaccaaccattggttcagttgatgctcccgactttggcaacggttttggaatgtcagcaccacccaccgatgctgccctatttcctgagccattctctacctctccccggctcccggtcaccaaggctgaggatccagctctgtttctgagttccccagctcggagattcggaggtcctcaacttacaccagagacacggtctcttcgtggccttcgacagccctatcaccaccaggcagaagagtccaggcgggaggagcttatccgagcacaggcacccaatggccaccgatccgatcctttcacggttttcccgggcgagagcgaggaggaggatgacgactacacacccaggggaatacgaccagttctaacccgcagtgcgacccaccatggcatgtctagctcatcgcggccgcacagtcaagccgggggctttatggcatccaccaacggaatccgaaagagcccaagtaaagggcgttcgtctccagcaaaatccatgcgtccagcccccttgacacgatctagttcgacagccaccggctccttgacgcgctcgtcatctgtggtgcttcgcattggacgagatggccgtgcaaaggctgaaatggagcccctcagtgaggcccccacagggttgaccgatcccctgactgggattgatctggatggctcttcaaccgagagtgaatcagatccagctgagttctcggaatatcccgtgttgcatcgcgctcagtcgtcattttcactttatgatatctcgaggcgtccactatcccggagtgattcgggctcccggcctctttcaaagggctcctatgcttccaccgtcggctcatcacactcgggtcggatgtcaccctgggctggctcttctatgggaggcgggcgagcaacgtatcgtggatctcctgatattaagcggacacccaaacggcattcgtctctgctgcactcggactcggcatatactcggggtagcgtggcatcagacttgttacccggagaggatgacgaaagtggtgatgctcaatctgcgcttcgacaggtcctcaaagaacgcggccggggaccaagatccacgaacgcgtttggtaaccgactttctcggtcatcacacacctttactcatctccgctcatcaccaccccgccttggcagtgattttgacatacatccccgtcacaatgcttctcccacgactttgaccgaccccgatcttgcaaccccaggcacagagcgtcacagcaaccccagtaacggtacacgatgtgtctgccgctcgatggataatggtggccatctcatgattcaatggtgagttcctccatcggccttgatttcaaagtcgattgtactaactctcccagtgaatcgtgtacacactggctgcatactagatgcgttggattggagcgtgcaaacctgccctccgtctatgtctgtgtcttttgtgctcaaacaccatcccgacaacaccgtgcccgaacaacttatgttcccacggggcaagcccctccctctcccttggcccacaagtcattccgcttccggtaaacccggtgcgttgactgccatcttggattgcatatatgtcttggaaagaccggtgccttttgatttcttttgtgttctttccccaatcgggctctcttaaactctgcattagccgggccaccctgccccatttcataatcgcccgaaccccattaccctcatgatacctatgtactattccctcacaaccctggacgaaatcagaatagaatcatttttatacttctccgcacatctgtattatttgtagcctgcataacccccccccccacccccccccatcccnnnnnnnnnnnnnnnnnnnnnnnnnnnnnnnnnnnnnnnnnnnnnnnnnnnnnnnnnnnnnnnnnnnnnnnnnnnnnnnnnnnnnnnnnnnnnnnnnnnnnnnnnnnnnnnnnnnnnnnnnnnnnnnnnnnnnnnnnnnnnnnnnnnnnnnnnnnnnnnnnnnnnnnnnnnnnnnnccccgcatatcggagtagctaaccggtctcgggagaggagccggcccggggtctaaccccaggaaggcccgacttatttaatttcataaaagcccatcgatccctctttctcagtcagtttctcaattttactccgcttgacctcctagttgactgaacctcgccgtgtttacagtagaccctaacaaaaagccctatcaggtaccccgggccggtgaattgtatagatcgggctacggtctgattggtcaattcttacttatcggctcaccgcctttttatcaaaaaagcacttttctccgcgcggagtcatattgcgctctttctttttttgcgcgccattcacactctttggtctcattccagtcattcgcgcttcgccgttcactcgctccaatgtctgcctctctccctggcagtcgggacctgcctgcgtcgccatatgacctgaagacctattggggtcgcgtgcgccatgccgccgacctttctgatcctcggtaagttcaaatagaagatattagtggcattgagagatccccagcatatactgatcataccaattatgttaggactatgtttgtttcgtccgccgggcttgaaaacgccaagaacctcattgcttcttacaagcagaaccgcatcccggccatgacaccggagttgtggtcggcgaagaagatcgttgatgcgacattgcaccctggtatgggctcgttcaatgtcaggcaatagccattggctaacttatgaccgatcagatactggaatgcccgtcttcttgcctttccgcatgtcgtgctacgtgctctcgaacttggtcgtcactgcaggcatgctgactccaggattgaaggtaagcacctctgcatatgcaacatatgaacaacgtactgacaatacagacaaccggaaccgtcctctggcaaatcggtaaccaatccctcaatgtcgccgtcaacaacgcaaacgccaacaaatctacccccctctccatgtcgcaaattggcaagtcatacctcctggccgtctcggcctcttgctccgtcgcagtcggtctgaacgcccttgtcccccgtctcaagagcatctccccaaatacccgcctcattctctcccgcctcgtccccttcgccgctgtcgcctccgcctccgccctgaacgtcttcctcatgcgcggcaatgagatccgccatggcattgacatctaccctgtcctgtcagaggccgaacgtgctaagcgcgagctcggtgagcacgcagagccagtccaaagcatcggcaagagcaagaaggcggctacccttgccgtcggcgagacggccatctcccgtgtcctgaacgctacgcctatcatggtcctaccaccgcttatcctcgttcgtctcgagaagacggactggctgcgtgcccgtccccgtatggttctgcctattaacttagcgctgattctgggtacttcgctcttcgcgctgccgcttgcgctcgctgcgttccccgctcgccaggctatcaatgttaacagccttgaggaggagttccacggtcgtggtggtgacctaggcatggtggagttcaatcgcggaatgtaagttttgatctttggtgtttcgcagcgtgcatatcacatatccttgcataggtcagaaaatatatatacctgttccccgtttataaatgtcattactgttgtccatatagaccattcaatgaataacaggtaccactctgcccttaataatcccctcaactcgctccgcaatatcaagcaattcatcatctccccaacgccggcctatcagctccaacccaactggaacaccaagcgcagcagacgcagttttaggactccgcccagctgtattcccatattagtccaacaccaagcaccgaatatatataatcacctaccgggaatacaaatagcaggcctccccgtcaacgcagccaaaacaccattccgcccagactgcttcttcgcaccaatcttcacaggaagccgtctctggtgcggatacaccagcgcgtcgatatcgtatctatcaaaacattccgccacagactctttgagagcagcaatatactccagtcgacttcggtacgcctcgctcgtcagcgaaaacctctctggatcttccaatgccgcagagaaaacatgcgtcacggcatgaggatcgaactcgccgctctgggcaatggattccagagatcggtgcggtatcgacgaaaccagcggcgactgcaggaactcgtctaggtagtgcttgaactcgaaagcctgtgtatcgccattcgcgaacagggtttcaggactccagtccggatgactggacggggcgataggcacgaagatgatatccgcatcgtgttcctgtatcgaatccaaactcgagcggataacatcctgcacgatctcgttctcggcgagatactccgcttccgcttccgattccgattcatctgtacagatttcaggctggaaataagcctccaagattccaatccgaacctgtcgatcctccctccgaggtaacccttcatctacccccaaagaggatataccatccccatccggccccttcataaccccatacaaaatcctcacatccccaacacaccccgccatcggccccgccgcatcctgcgtccgcgaaacaggcacaatccccacacacgagaccctccccgtcgaaggcctgaaccccacaaccccacacgcggacgccggcgagcgcagcgagttcatcgtgtcggtcccgcacccgaccagcccgaagcccgccnnnnnnnnnnnnnnnnnnnnnnnnnnnnnnnnnnnnnnnnnnnnnnnnnnnnnnnnnnnnnnnnnnnnnnnnnnnnnnnnnnnnnnnnnnnnnnnnnnnnnnnnnnnnnnnntgccgcccccccccccgacccccccgaaccccgccgctagcgccgcggcggtcccgccagaggatccgcccggggtgcgggtcttgtcgtgcgggttcagggtttgcccgccgagcgaggagcgggttattccttggagggcgaattcgtggaggttagctttgccgaggattattgcgcctgcggcgcggaggtgcgcgacgacggcgctgtcggtggttgtttttaggttttgcagggcgagcacgccggcgcttgttggttggtcggttgtgctgtagttgtcttttaggattagggggatgctgtggagggctgggaaaggtttgttggtttggttgtaggtgagtgttgtggtggttttttggagagcggtttctagggctgtgctgtttatgctgatgagggctttgagggtcccgttgtgctgggtgattgctgagaggtatttctttactagccttgggccattggaggggtctttacggagtagttcgtggaatttggggattgttagctcttctgcttgccatggggagtccatggtggtgagtgttggatagaggggaattggggaattgagaattggtggagttccccggatgttgatctagtgggccaattcacgcacgccatatatggatctgcagtttcattgatggagtcaagtattcgtaattcatatttgccctaaatcggcaatgtcaattggcaagtgagcttgccatcatgtagaacccctggcgcacatggctcgggttatcctccgatgtataagaaaccgagacgaaaggcacagtcatatacagatctgagaagaattagaaaattgaaacgaaagaaacacatatatacacacaccatacggttaacaaatagacgccacaaacaatcaaatggtataatcatccggactcagcctagaccctcccagggctcccgaagccggattccataaacaggacgggaaaagcagaataacatgtaaccggcgcctttaagaatggatagaaagatagataaagcaaataaagtaaaaccggatagcagcagaggataggtccctcaaggataaatgcagcgattccggttgctcaagggccaagggttcaatacccctgccatgtggtgtcacgaaggcagccgacgcctgcatgaggtgacacctgcaggtattgaggggaaccctcccagggaccgaaaataaaataataaagagaagaaagaaagcatcgtgatcatgattttccgaagtgcaaacaccattccgtcccattcgcgatagagaaaaagattaccctcaagatatgagccttccatccgtagctggatcctgttcacgccggtgaattcccttctgatgccgttgaataagccgaatactggctactgtagctgtgtggatcgaggcctaagtgcgtgcttggcgatgcaatccttggccgatccggtaagcctctgtgccatcgtcgacaagtgtctccttgaaccacgggtgcttcaatgcctcctttgcggtgatccggctcttgggatcgtatacaaagatttgttgcagcaaatccaagaatgaacggttgaatggcgtgttggtagggatgaactcctatagacgaaatcagtcaaaagaaagccccacaggtagatatgggggacacttactgtcaaagacttcatcgcgcggacatacttccgcgaggctcgggtcgtttcagcgttgggatagtcgatcttgtttcgattgaagtacctggtaaagttagtccctatcacagaaagattgaaggggcagggctatttacttagcagcagagttgatactaccacctcggcccgccatgactttcttcaccaaagcagtgtcgattcgattgccaatgacggactccatcatcgccaggtgttcaaggttgtcatgcgtctggaacagggcatctccggtgaagaattccaccaggatacacccaatactccagatgtcacacgggaagctccaacccaggttcaatatgatttcaggagcccggtagtgacgggtagagacgacagatgaatggtattcgtcatcgaaggtcgccgaaccgaagtcgatgagtcggatttcaccatcgaggagaacgcggcgctgtcgcgcgttgcgagccgtggcatgggaagaggaagggatagtgcggttgtaagtgaaggtttggtaggcgttgctgacgaggaggatgttttcgggtttgaggtcggtatggataaggtttaggtcatgaaggactaataggtcagtggtctaaaatgcagatttagaagtgttggagaacatacaggcaacacttgtgaacagctgccgggcaaactgctggatctgactgctcgggaatggcacaaagccattccccttgaggaaatcaaacacgctttgtcctagtagatcggtgacaatgcaaatgtgattccggaaatcgaagcagtctcgaaggtggatgcatttgttgcggttgcttttgtcgttcgaagccagagttgacaagactcgcagctcgattcgagatgcgtcacgatacttttggatcgatcgtatgattttgactgcacagcgagccttgcgctgcttgtcataggcttcgaccactttgccgaatgtaccttgacctagaagtttgatcacagaatctcgagaaaggttagcatggtcgacaagatgccagagatacttttacttacatcgatctgtcaatggcgtgtcgggtgtgacaatgtaatggccatcgtcatcgtcaaacttcttgatctgggaactggtgtactgatcgagcaaattctgtcagtggacctgcacaaaagacacggtagataaaacactcacatcgcgaacgactggcacaggaacatcctttgccttgattggcggcttcggaggtgggacataactcaggaaagcatcgcctgcggtctccaactctcgtcgcttctgctcgtcgcgagtcgatttccgagtggcgcgtttccgcttttgaccgacagagccatcctcatagtatacaccattgctcgcccccgaactgccctgcgaaccaagcgaagttggagctgttgtgtgtaaagatgcggttcgatcggtcgataaagacgtggcagaggattcctcgccgtaatgttggggattgattgagaatgacgggcggtcatagtggcccaggtcataggcggtttcaatccccgttcgccgcctcttcccagcgggctgagcagccgcaggaggtggtctggcagaagtatttgcaggaggcgcggcggcaccattggatggctctggaccaggactgtcatcgatcacaatgacttccttgggaagtccattcttgtagaactcggtccaatctggtttctttcttcgacctccaacagagggagccacactggaaccactctgattggtcatagcagacggggttgttgtcgcggggggaattctcggcggttgggtgtagggaagggtggtcgttgtcggggaggggacggaaatggcgtaaggattcgcaaggcgagtccctgcggccgtggtcgaagtcgggtacgaggtattcggttggtacgaaggatggtgaggatatccgtaagcctgatgatgagaaggatgcgttgcagtggcagtagacggagtggacattgtgcacgaaggtatcccgtcacacgaacggtatgaaggttgtggagagaagactggtctaatttgtgaccgctagttgatgtcgcgcgtcaggcttcctgggtggatacgaggatctcaaggcaggactagccagccagagaagaaccaaaccaacagagattggagttgacaagcgtgtccggagggagatctctggagacgtgaagatgacgggctgaggcggtgggaggatgggaaagacagtttcaaatgcgttgcatttcctcgacaatttcaagacaaggaggtgaagcaaagagcattggggaacttggcgacatctgtggtaaacgaggtggggagggaagggcctggaggcaaaggtcagtgatgatggaagagtcggagagttgggacccgttgccgatcaacttgggatttgagatttgagatttgggattttgctcctcttaattcgtattatcttctatagaattacactcgccgcctggaatacagctaattcaggctaatttatgattgtcctgttctttttacttcttgatcaagtttctcaagcgttaaatacctaaatacccatgttatacgatgttcggcctattccctatagtatacacagaaaaacctcaacccagaggcccatgcgcctctagggagaaaggcggatattactttctcattccaatacagccatgaatgtaattaaaaggatctaaagtcctagatgggccttgaggggcccccccagggcccgccaccggaaatggagcatcgcgtccaagccctggcttagccgaatccaatccacaaggcgcggtgaacatctgcggtcaagaatattcagaataccaagaataccagtatcgaagagtatatcaaacattacagcccctaggagatccaggaaatcgcccgtatagttaccacctgacattctcactgagtcagcatctaaatcgggaaatacgcaagccaattgcgtacaggcatattagaactagacgctaatcagttagtcttcgatgggctaatggtttcatataagagtgaaaaaaatcaaccggggagaaggggttttatagagactataggaaatgagaccttacatatctatgtccaggttgccttgtcattacctaggctacagttactggattaagttcccaagagatatataaaagtgaggcaatccaaacagcctaggtagacaccaatgctaataacacaacatatctatgaattgatatccaatgattggcagggtattccgtacctttgactgcctcggctctaaattgcctcaactggacatctttaacgccaaccaaatttagtaatttgatatgcgcctagttaactagctatttactatttagactggctagcgtgtggctgtgagaactacaagatttaaatagcgatcttcacttggatgtttataatcgggagaaccaaacacatagaatatgacagtagagaattaatatgatccaaagcaagtctcatttattgccttgcgctagaggaaactatccaagagcgacgagagtaatttaccgaggtatgaaaaaggccctggttcctctatcctcttaagatgtaagctcaacctgtagttgagtggaattaaagatcatggcctgacaacctgacaacccccataaaccaacgccatcatacacacgcagagaatgcaagaactcctggtgcccggagccacagggctcccatgggccaacaaaaattaggggcataagaaaataagattacaaacatttatgacccagtcagtttcgatcgcgatcctctctgggatccttcaggtagcccctctgcacatgtctggtcgcccgtccatccgcctccaacatgaatagaaggtctctgacctgaatacccattcccttctcttgatcttcacgccatattccgaggcgacgctgagcgtgactgggtgtggattcaccgacaccggacttctcaggaccggcggtgggcgtggaaggagttggacgtgagggagacgagaacccaccggatttaccaccgggcttcaaccatgagtatgactttttggcgccgaacatactgcggccacccccagacaaagccatgcgtgccgtcgccacagactgtgcatgttgttgggcctcggttgctttggaatcctgcattttcttcgcttcttttttgctaattgactttttatcgaaactaggcgccctttcgctgaggggcgtcgagggcgcagatcctggatcgacagactcggctcgaccagcctcatcaaggatggcattgctgttgcgtttagcacgcttggctgcgcgtttttcctcttgcgaactctcccggtgtatgaatgctctgtaccttgccgcatttggctttgcactgggcgattcaatgctagcatgaggacctgtcaagtaattagtaccaagtcagttaagtggatatgataagcgaaaccatacgtttcacgggggtttgagtgctccccgtagcctgcccagggggtttcgcgacatctttccactcaatgggaactaggccatgagaatgtgctcggcgacttcgagcaagagtcgaggcgtagtcgatgacacccctgaatctttcttcggtagaaatagataggagattcagtatgtccacaagaggagcaccttcctggttgagaattgtctgaccagtgcgcaccacagaagagccatccggaccagtaacttcaatcggctgtggtcggccaggtacagggtgaaaaaggccttccgaggggattcgaacaccaaggtcaaaacctcgtttctggagcttctgttcgaggagttttgtgatcaagaacggttcttggatatgatactgtgctcgccttgctgcgatagtgtcctcgcgagtcggttcgttgggatctttgaaggggacatgtgcctgagatgagcccgcgaaagagtcgtgtgtggtcgccggtttgatatgaggcaaatcaccgaagctagtcgaaggggttcccggggtagagccttgagaagtgaaggaggtattgatagatggcgggtattgagactgtgatccgcgatggggagcctgcgcctgcgcattctgcccggaaaagctctgtgtgagaaatgcttcctcttccctcacatcaattccagatgatgctagaacatctgtcagttcagcagcatctgttgttttgtccactgggcgagacggaggacccatagtcccgggaggagcgggagcagatgttgcagacatgttcatattcatgctcatattcatcggcgttccgttcatgggagatggattatgtggtagctgaaccgcgttgaagctcggagaaccgtagggagattgggtttgagaaggcggtagaggagagaggcgaggtcgcttggatggagggggtacagcaccattcaggggagatgctgccgagttgggagatggggacgagacaggcggggagaaaggttgagaagaaaactgtggcggcgggggtgcctgctgctgtggatgccgagcttgggccatggcgattgtcgattgtcgattgatgggatttgaaatgaacagaggctattgcgccgagccgttgtagctttgcgaatgaatggaggtccacgcgtggccgttaaactgagcggattgctcgcaccaccagccaccacctttgaccatctcaatactgaattcaaaccatatgtacgacacgtgaatgttagaattgttggctcgcgcgcgaatctagcagtaatcggggagacagtgatgcgtgacgtggtaaggagctttctaggtggtcgaactctgctccgcggatcgcggattgcgacacacgtgactaagtttgactaagctctctgaatctgcgggtgtcttggtcgcaaaagatcaatcttctattgaatcacacatagtcctcataagtatattgacacctgcttcaatacccggagctgctccattcatcatagcctttcgcgcaagttatgggtgttgcgctgagctcttattgagatcctaggcttgatcgtgcgacgcgcgggtgctagtccccttcaactagacttcttaaactcatattaaggaatcggtcaacctactgacaccttgcccaattaatctctaacacctctaacacctctaacaccatggcgtccaaacgcaaagctgcagcaatgggaatggctggtgacgatgagcccgttgacccatcagacgaactggcattctactgtctcggcggcggcaatgaagttggacggagttgccacattgtgcaatataagggcaagacagtgatggtaagcctcagctgggacaaggaatgaactcgcagatactgatctcctttgcttctgtagcttgatgccggtatgcacccggcgaaagaaggcttctctgcacttcctttctttgatgaattcgatctgagcacagtggatgttcttctaatcagccagtacgtgcatctctttttttgttttacatatatggaatcatggcaagcacgaccgggcatcattctgcacttaccatgaggcacctggcacctgctgcaacggaaggacacattcccctgcatatatatgagaagcccaatacaatacattgtcatgcatatatttcttgtatcactgtaccctcttgagtttcgaattcgaatgctctcctggcgcgtttgttcacggctatcgcagttgactaacggtctgatctgtatagtttccacgtcgaccattcttccgccctcccatatgttctcagcaagacaaacttcaaagggagagtcttcatgactccagcaacccgagcaatctacaaatggctcattcaagacaatgtccgagtcagcaacacatcctcttcctccgatcaacgcactacgttatataccgagcgtgatcacttgtcaacactccccatgattgaaaccatcgacttctacacaacacatacgatcaatggcatccgtattaccccgtatcccgctgggcatgttctcggggctgccatgtttaaaattgatattgcagggcttgtgactttgtttacaggaggtgagtttgctttgttacaccttggtcatcaacagcattatatgtcaattgctaatcgaccgatagactactctcgcgaggaagacagacacttgattcccgccgcggttcccagtggcacgaagatcgatgttctcatcacagaatctacattcggtatttcctctaatccacctcgattagaacgcgaggccgccttgatgaagtcaattacgagtgttctcaaccgcggaggtcgagttctgatgccagttttcgctctcgggcgtgctcaagagctgcttcttatccttgatgaatattgggaaacccacccagaactccagaaatttcctatctactacatcggaaacatggcaagacgatgcatggtcgtgtaccaaacatatattggtgctatgaacgataatataaaacgactcttccggcagcgcatggccgaggctgaggcgagtggcaataagagcgtcagtgtcggaccatgggatttccgattcgttcgaagtcttcgcagtttggagcgtttcgatgatgttggaggatgtgtcatgcttgcctcccccggtatgttgcagaccggaacaagtcgtgagctgctggaaagatgggcacccagtgaccgtaacggcgttgtcatgaccggttacagtgttgaaggaaccatggctaagggattgctcaatgaacccgatcagatcccggctgtcatgtccaaggtttccactgggcatggtcgtggtcgtgttccaggagtgaatgatgaggatcaaaaagtcatgatccctcgccgttgcactgttgacgaggtcagctttgcagcccacgttgatggcgtcgaaaatcgtactttcattgaggaagtaggagcaccagttgtggtaagtgtgacatccacccagtctatttgaaaatttactgacccactcaagatcctcgttcacggcgaaaaacatcagatgatgaggctgaagtcgaaactgctcagccttaacgcagataaaatcgtcaaagtcaaagtctacaccccagcaaattgcgatgaagttcgcattcctttcaaaaaagacaagattgccaaagtcgtcggcaggctcgcagagcttgcgcctccatcggagaatgatgatccccagctaatggctggagtcctagttcaaaatgggttcaacctgtcgttgatggcccctgacgacctacaggagtacgcgggcttgacaaccacgactattacttgcaaacagcatatcactctcagctctgcgagcatggatttgatccgatgggccctcgagggaacttttggggccattgaggaaattggaaacagcaagaagaccgaggctaacggcaagaacgacatggatagcgacggcactgcaaagcaagaagatgccgacgaggagatcccatcggacgagacgcagacattccttgtcatgggatgtgtgtatcttcgccatcactcccgcacccgcgaagttgagttggaatgggagggtaatatgatgaacgacggagtggcagacgcagttatggctgttttgctcacagtcgaaagcagtccggcctccgtaaagcgtatgaatttctgtccttgtccacctctttacttgtgctaactacggttatagaatcggctaaagacaagcaccaccatcatcacgatgatgatgatatggaaataccctcacttcccaaccctcattctcagtctggacctcaagagcggcttgctcgtatgctgatgatgctcgaggcccaattcggcggcgataacattggccccattgagcgcccacgaatcccggcggatctcgcactcggtccacaagaagatggagagatgaacgaagaacgaattgccgatattgaggctgccgagctggatcgtcttatcacaatgggtgttcccgtccctggtattgaaattagggtggacaagcatattgcccgtgtgtggcttgaggacctggaagttgaatgtgcgaatgctgtcctgcgagaccgcattcgtgtagtcgtcgagcgggccattgagactgtcgctggtctgtgggcagagagttcgattcaccaggacgcggtgcttaatggttctgtcaacgggacaaaggggattgaactggctgataggaagaaagcggctgccattgaggctcatgcttgatctctgtcatacttgtataataatgaaatatttccatcatccatgatttgacttgacttttctacatctgcttcgtcatgtagtgtttctttcggtagttggttttttttaacaagagaatgagattgattaaaatattgcacgttccgaggatataaaagtagactcttagagtagatagatataagtgctttatagcgaggcaaagacctcctgcagaactttctccagggtgtcaacaataatatcaatctcctctttcgacacaatataaggtggcgcgagtataagatgatctcccttaattccatccacggtaccagagcagccatatagcgagacactgtactccggctgtagacccttctcctggatccggtaagacagacgatccttggggtcaaatggctctttcgtagccttgtctttgacaaattcaatctggaaagagttagtacatttttttgtcgtgcaatatctactacaggaacctgcaacttacaccccagaacaaccccttcccacgaatatctccaacatgagggtgactctcgaatcgctgcttcaattgtgtctcaaggtaagcacccatggtccggacattatccaccagagactgctcctgaatagtcatttgcacagcaagcgcagcagcacatgagaccggatggccttgatatgtctgtccgtggcggaactgcccggtgcctttgtccatcgtctgcacaatagagtcaccaatcaagacggccgacaccggcgcatagccaccacccagaccctttgcaatggtctggatatcgggaacaacatcttcttgctcccagacatgcaaagtgccgcaacgacccatgccgctcataatctcgtcaaggatcaagagggcgccgtgcttctcgcagacggctttcatggcacggaagtaccccggtaccgcggggacacagccgagagcctaactagtataagttggatgatctgatagcttagagttcaatataggaagtcataccgcgccgacgaccggctctgcaatgaatgcgcacacagtctcgggcccgacacgttggaactcagcctctagctcggctgctagacgtgccacatagtcagcatcagactcaccgtccagtttcccacggtatgcatagcatggtgaaacatgggatacattcttcgagagaagtggttcaaacggctgtcgacgctgaacatggccaccaacggaaagcgccccgagcgtggtgccgtggtaggatggaagacgcgcaataaacttggtacgctcgggttggggagttggaagctctaagaaatattggcgtgccagtttgagtgcagcctcgacagcctcagaccctagatatcctcagcactgtatgtgtgaacagaatttcgggttcttggaagggctgcctcgactcacccgaactggttataaagaccttggatagttttcctccagtagagtccactaggagtttggcaaggtcctcggccacttgggtgccgaagaaggcagaatggcagtaagatatctggtccatctggtccttgatcgtctgggtgacctgttcgttaccgtgtcctagacaagatacagccgcgccacctgtggcatcgaggaatttggtcccatcttctagaaagacgtagcaccccttgccaccaatggctttctttggaacgaagcgtgtgtcccggtggagaatagcactagccttggtttctgggaaataatgtcagaaatatgccaagatattgcatgtgttgacataccgtcggtcatgattgaagtttatagaaatgtatttcaaagaaagaacgcccgaggagatcaaaagccttatatatacctgtggatctctctccgatggtctcacccgaggcaatgcccctgttctgcggggctaagtgggttcggcataccgaagggaagaagccgggccctcaattggaccgggaacggactttactgtttcctatcttgtgtatctggtctatcgtgtttgaagagaaactttagttgtagattggcgtctggaaatgactcattcttatgaatgcctgggtgtactcgggaaagatatatctgacgttgagttatacttcgtggttcggtttggataaataggacactgcatagagcatggggctcatatatttcatagcaaaatattgataaaatagaattgaccaacagatccctaattatttcccaaacacaatcccaaaagacataactagggtcattattaactattatcaatcatattgacgtgcacttggtcgaacgttgaacagacatccccacgtcccaccgcccgcacactgcattctgcccctcttacttggccacaattcccgcggccttccccagacatttccccatctaacacatccaaccctccacaatgtcgcgtcgcgcccaaatcgaggaagtttccgactccgacccagaagagatcgccccttcttacgactctgacgaggaccttcccagaaatgccatcatcgcacccgtaaatatcccgagggctgcacctcaacctcaacaacaacagatgcccatgccccagcccatgccatcgatgccggcgcctgagcctcagcgcgagattccccgacacttctcatgcttgtaccccgtgtacttcgataaaacccgatcgcgcgccgagggccgcaaagtcggtgcggagctcgcagtggaaaaccctcttgcgcgagatatcgtcgatgccgtccagatgcttggcttgaatgccggcttggagccagagaagctgcatcctaaggattgggcgaatcccggtcgtgtgcgtgcgcaggttaggacccaagatggtcaattagccaacccgaagatcaagaacagtacgtggctgatgcctttgatggagtgaatgcttctttctgttggacatgaactgacattgttgcttagagcaccacctctatattctcgtcgcacagtacttgaaggctaaccctaccaccgaaaaatcaccctaccggctacgaatccgtggcctgcccatgcctgagaagcttccagcagctcctgctgccccgcggggttggaagatcgggacgatcctacctatccactcgcctgcctacagcggtggtggtgtcagtgacaaccccctcaaggacgcaatggccgagatgcagggcatggagggaatgccgaacatgtctgaaatgatgagtcaaatgggcggaatgggtggactgagcagtatgttgggtggactaggcgggctaggcggaatgggtggaatgggcggcgagccctcaggggcaggcgcggaaaagaaaaagaaggaaaagaggaaggtgatcagggcatgatttagcatgccctttattccgtgttccaattgcattgtatggcgatgggcgttgctttttccccctaatttttgatgcactcgagaaagggatacttcttgataccacggatctgcatctgaattgatctcattgtacatccacctcaaatcatgtccaacacctacctgatagttgtctgtcctgtatgaatcgaacatttcttggactagcaagtgccgataaaccataagagacctaccaagaaagaaggtggagtatcagttctaaacttgcatataactatgttatgcaaatgctttagtagtgctgagtttggtccgagggttgatctagcgggattcattcaagaagcagtgaacgataagtcatgttctcatgcaagggccggcaaatctatgtactagctaaaacggacatgttcatgggtatcattatcatgcggtgtgtgtttctgtgccgtccgggcatcctccatttctatactgccagagccgactaaagtccttgacgcgcagtactcgatccaactcattcggcggtgaccgtcgcacggtcaatgcgacagggagaaacgcctcgtctcgggctatcgtggacccaactcgacgcggaggaccatcatatccatttataccggcggttgcccatggctcgacttccatatccatgaatgaattggagtcgaggacgttcatatcaggacctagggtaaacatgttgccgaggtaatgcatgttgaacaggtggcctgaatgcgggcgcacgaacagccggcccatgtatcgattcgggatttccacgaagtgaagcactcctccctgagccacgatgtcaccttcattggcgtagtgctcgatgtggccgatggactgaccaaattcaggcgttagatcaggtgctgtgtttccttgtggccttgcgagctttgtccatcgcgggttgttgaagtgattcgcggcatttccgaaggtgtatacctccaagtgatgaaggagattgtgtggtagctcatccagaagccagtccatgacaaggcccccttcaataccgccttgactgtgaagaagcagaaccactttgtcacattctgggtctaagatagcttccttgaccaaggaatacgctcgtcgtatatcgccagtagcgtaggcaaaatctcgctgaatcagacattcaatgagatcaaatatgatgccagcgctagattccattagtatttgcaagtctgaaacccaacacgttacttacgtgcgattgtgcacggccgtcactttccgaccaaagatgtatgacagttgatcgatgttcatctgtacccagtggtgtctacaggtaatttgagttagcaactgaagacagagaactacggagatatatctcctaccccgctgcaattccatttatatacacccaacgctcccgctcatgacttggtcgctcgaccacagacacttgagataccaggacccgctggaagctgttcaacatcaacatgacaatcgaataattcacagtgaaagcaatagccgaataaacaatgatccacaggccgggaaccatgcagataaccatgatcggcagcgagagcaggaaagcaacttgataaaccaagagaaacacatgggtcaacaccgtagatgcattgcgtaacgacggatagagctcgtccagctcacgggtgtgacctagattgaggggccgtagaatacctggaagcgcccatagcttcgaaataaacagggacaagtcgctcgagagtaacttggtgggtgaggcagtgtagggcaacggggtatcctccttgcccggacatgtcattgtggaacgttgacaagagaagaagtgtaacgttgagatgaaagtggacatgaaaaaggcgctttgttgtcttgtcatgtgatatagcgcctgcctataacctcgtgttcgtgagatctatacgagcttgtgacttacatcggctgattgacctacaggacttttttggaatgtggctttttggtttctttcatattaagtaattacagtgatattattgttctcattctttgattccttccttcgatgaaacttgaatctccgtcatttcgcgaagcaaacctgggagaggcgcttgcaatcagcgtggtcgatgttctgttatagtcaacacacagttagctatagatcagataatgggagaatatgaaagggaggatattaacgaacaccatgacgcatttttcgacgattgttgcggcggaacagatatcttcggttgatctgcataccggcatggcgaatctcacttgaataccattttgcaatgtctttggcggtactggcaatttcaatgtcgctcaaattccagtatcctgggacacgcagggacaggcaccatttgacgtcgtgatggacgggctcagatgaaatgataccgtctcgggcgacgatgcgagccaccacaaggtccatcaaatcttcgtcgtcaagttggtgatcagcccagttgaagaagacagtcacccactggtttcttccagcgggatagtgtttttctcgaatgtttcgtccatctggatagttgaacattccttggagcttggtgcgcttctttgcttcctttgtgactggagaggagtcaacagacgagattggtgtttccatggtggaaatgtctgagatagagaagaagatattggtaagatagaacaggaagaaagaagtgagtcgagaatgagacagggtgagtttaatatctacatactatattgaatggaacgaaaagaacaaagaccattgatggtttttaatagtacaattcattgtgattgagctgtagagcgattaataggagcctttgatgatcgcggaagttaaccccaatagtgcactacaataaagctttgtcctttgaggactgaaaacacattgtttagctgagctcacattatgatgaaagcacatcgacaacaagctacttcattaggagtatataaacgtccgcaagacaaaattctcctccccaaacaggatatcaaaaccaaacccaagcccctgatccagcccagcaggacgctgtgtacacaacctgcgataggagtgaacaaagacagtctagtgactacatcccattccaaaaaatataacttggaaactgacctcctcatattgtttattatttaggacagacatatcgtctgaaatctaccacagggctaccacgacccagccctcctttaaaactgtgataaccaaaagcaatgggaaaagatggagggtggttcgaaaacagacgagacacaagcggtagacgtagagcccctttctcaggacaaagagacacccggtttgtcactgacctgagaagggacgaaattaaaaagctaacagagatcctgcacatagacaacacaagagcgagacacactggtgagatcgtcaggcgtatgatacgcgagttgccgaaggatatgcgccgtgatcgctggtcaagaacgaacaagcatctgtgcgatgcccaccagggtctgaatgcaaatcttatggccgatgtgttcaatcttgttcagagggaggtcggtcaccacctccgcaagtttgacgcgtacccggacctgctgaagcccctcgatgtattgatcctgcagaagctgcaggctatacggggcatgtgggagaaacctgacccgaaaaacaaggctgtctcacaagcatggcactatgagatcagctgctgtcaggggtgtatggtggctcggattgcgagtgacaagcatgcgctgcgcaatcttcgaatcgctttgctctctcgcacgcagacccgtctgaaccatgccccacgaagacttatgaaatttgtcgatacctgcattgacctattccctgatgacgttgatgagctgtatggcacatctagccagtttgcattcatcttgaaagatacccgcaaggcctgcagcaaggcctgggccaatgacccagcacatgcggattcgaggaccccacagcgaaggcacaccgaccatgacaagatcgacaagggtgacagaaacgaaaagatcggaaaggatgcacatagccatcaaccagctagtgagtatgatccgaggaagaagtatccccagccaccaccaccaatcacattatcacaccctacggaaaggtatgtccccgaatcatcccggtcaacttaatgtactgacactgacactggagggcgcagaatatatcgcctgacgtcgggccattccagatagccgtaagatcatcgtaccatacggagctagatcgacgctcagacccgaacccggaacgcatcactagatttttggatttcgccgatgacaattaccaaggcttaggaataagcacggaaaggcaaagtgcgagcactttttatggacaccctggaaaccccccgtcaccgagcaccgcaagcacactcttgggaaccatggaagaaatcgacaaacttcttgagatgtacaagggtatgggagcaaacccctactcgcacagcacgcaatattgttcattgcatgggggtagcggtgcctcatcacagtgtcgttccccgtcgatctattccactggcagtgaatggagtgacgaagacgaagactggaggatgccagaaagtggcccagcagcgaggaccacttggaatttgttgtgtgaacagtcgaatatgatctgatcgcttctttttgtcttcgcatctcgcatgggcgctttgttcctcgtgctcttgtgccccgtcatttccttttgatgccatttggtttttctttttgattgtatgtcaaatctggtccgagtcaggtgttctgagaatatgatatttgcaaatgtatccgagttaacgaatacccaaaggaaagaagtaaatggcaaataataaacattattgacagtaggtcatagagcaaaccatgtacaaagcattgacaggcgcattctgaagtattaatacattgggccattgatcccatatacaaaaaataacggaaagccccacagtctggcggagtccgccagcagctccagggacggggttagggggtgcgtagaaaaatcaacacgttctcgggcttcatttcatcatggcttcagttgtggagaacacttccaggaaccccgtgactcgggcccttgagactatcaacagtctttcggcgcagccgagtgcgggccgcaggtccctcagttgataccaccacccgctcacgctcacgttcacgttctccggtcaaagtcacagctggggtgttattaagcgcctgggcagcatccagatccacctgcttctgagcgttctcccgagctcgctcgtagcgcagcttgacctcaccagtccaccgagtgccaagaaggcggtcccagaagatgaagaacggctgggagaagttggtcttgataccccagctttggtgatgaatgtcgtggtaggcggcgttgttggaggtaaaatgctgcagtggatcccacgggaaggcgtagccacagtgatcgtcgacagtcttgatagtcgacattgtaaaaaaccacatggcctggcgggtggtcatgccagagaccaagaacccaataccagtgccagctgtgtccaggaggaatccctcaaccggatggttgtagagggcgccgaaagcataagggacgtaaagacggtgatggcgggagtggaaagtcactaacagctggttagtatggaatcatcattcaactttgaaacgtcagacataccatagagccaccggttcagatgcatagcgcggtggaggaagtactgccaggtatccacaatggaaatcgctagcatgaactggagggtcggtataaagtaccaatatatgaaactggcaactgcaagttcccagctcgtgaacgcgggcgccacagcctcggctccgttgtcgaggattatggactgggtcacatcggggtatgatccaccagccagagctccggccaacatagtataaccgctttgggacacggattttccaagactgatagcgtcaactccaacaagagctaacaatgacgggaaggccttttgtgcgatccgcaatcgctgcgcccacacggcgacatcatattcctctctgccaacagtttcctcggcatcaaagtataggaacgcaagaccggccacggtctgaataacctgttgtaagacaacatcccgcacaacttcccagcgagtcactttgtttcgtttcagaacttctgcgggggtgtggaggcggtattcgacgaagtaatcattaacatcgaggtaatgatagatcatagacaggacccagtatgcgatgacgggcaatacaagcgaaaggatgttgtcaggaagaaaagcaagcagatgtccttgtggtgtcaaagtgtaggttggtaggggaggaaggtcaaacgcgacggatgcgttcatagccatgacgaaaggatggcgatgtgttgaagtgtagcacaaatatccaagagtgccgatcaaaaggatctcggaatcaatatcttggatattgaaatggccccaaggtcagaaatcaaacgaagagtgaacgtctgcaactgcccaccacgtcgaagtccggatgctgacgggtaggcgcgacgcaagaatgatttccgatcagtcagagacctctcggagctggcggttacatacaaaaggaagtatgtaaaaagacgaagagaatcagataatgataatgaaggaaagaataggaacggccgaagaagataaaagataaacgttcagatcaggagacgcccggattcgggtggcgcgagccggagccaagacaaaccagtacgatacacgtattattggtatctttatagatcgactgatagaaagaggcaaaatacagtatggtatggtatggcatagacttatgctgactcagctttatacttcgacctggacagccctgaacgaaagtaaattggttgctacagtgaaaaagaatctcaattgatttaaattgaatgtttcggacggcttttatcgttgaattggccataccccttaatttgccggtatttatataagccattgttgccccaagaatgacattgtgcctgggaagtaccttgaagtacccaatactgcgctaacacggagccagtggcggtggcccagactctccgataccgatttggtacaaaccgaacaaacacaaagtcccccgctctattttttttttttttaaagaaaaacctcgtccccccaccttgaaattgtttttcttccttcccgtgctacccttacttttttactctcttcgtcttcttaacgtataattccgccaaaatgcttatctacactgtatgtttgtcaatatcaaatccttagatttgtccctcttcctgtgtacgctctcagaatctcaactgacacccaccaggacatcgtttccggcgacgagatcgtcgccgataccttcaaccttgtccccaacaaggacttcgatatcctttgggagtgtgactgccgcaagtacctgaagcgtgccaacgaagacttccagctcgagggtgccaacccctccgctgaggacgctgatgaggaaggtggcgagggtgaggccactatggtccacgatatcgaggaccagttccgtctggtctggcttaaggctgaggatggcgcgaagccctccaaggaaagctacaagactcacttgaagcgtatgctcgtcttttgctcctcacttgattatccgcgcatccactgacttctgttctttaatatagcctacctcaagaagctccacaagaatgccgcgcccaagtttgctgaggccgagaaccccaaggcagctgaggacgcatggaaggccaaggccgctggagctatgaagaagatccttgccaactgggacaactacgacgttctcatgggccagtccatggacggtgatgctatgtaagctcacgtatcttcccaattttttttgaatattcgactaatggtttctaggcacgtcctgattgacttccgcgaggatggtgttaccccctacgctaccgtctgggctgacggtctcaaggagatcaaggtctaagcaactcttgtcatcccaaagaaggcgatagttaaaacatacgcaccctacacgaacaaatacgtcttgttggaagaattgcgagttacagttcagacgcagcggctacttattccccttccctgggcctgtctgttctaataaccctctcgcattttgtatccccgagttagtgatccactgggtccccaagagttacgcttcatgaaatcatctgtcatgtcttactatttttggcttgtactatgtaatctgtcttctgtcattggtccagtccttgacagtaactcccttgacttgagaaaagaatgagtattgagaccacccgaaaaaacagtttcttacgataaaataagtaaagcgataccaataattacagggatactagttatagtgagttatatttgcagatcatttgattattcatcactcataataagcatactaaggatatcccggccaaccaccctcatttttcccattccagggcggaaaccccccttctggagggcagcctggaagtggaaggccattggcatctaaatcaggcatgttgatggggctagtaccatgaaatgttgaggtagttaaatcaagacccgaaacggggtccagttccatcaggtcatctgcgacaggaagatgttgtccgaacacagcatcccactggtcccaatcgaagttgaggttggggtcaaccatcgatggaggcgtaggaattctaggtattccattaggacacgcaggatccacgaaggacatgccaccaccagcagtaatgtcagcatctgaaggctgaatgtgtggggcgggaggggtggatgcagaacattgtgtcggtggaggtgcgccaaacaaggaatccgtattgggcgaggaggtgccaatgcggggaggtatgggattatcggcggggggagggttgaattgggattgtgaaattggggataaggcttcaccctgtggttcgtattggtatcgtagaagggttttagtagcatccgggttaacaggatccgaggtgtgagagcgggtgaggttgtagaatgttttgacgaaatcgctaggtttggatttgtgtgttgagggatggccggccgatgctgaacccggagactcggcctgagagtgatctgagctaggagagtgacaatccccgcgagtgtcaactggcgaagcgaccccagcctggatctggtcttgttcggtccagagcattcgcggattgaggcctgccttttgccaagccttctgacgaaggcggcggatcatatcccaggcttcacggccaccgtccttcagtggccgttgtgttgaaacaccgtcttcaccacctacgacacctccatccggaccagaaagtgcgagtatgctgtcgatgaacgcgcgggacttaggtgcttcagggctgtaaggtcgctcatataggtcaataagcatgatcctgtatcttattagcgtgatcaccaacacctaataatggagtcatacatagtagcatgcattggttgatgattactaaaaatgaatatcagttgcccatgattcctggccaccatactagcggaaaaacttacccaggccagctccaatgaaagggctggaaatcaggatccgttgcgagttggatgaatttttccatgaaaccatggcaatgacgaagtgcactatcagtattagcacatatactcatttcccgatggtgtgtgcaaacctttggcgtgccgctggccaaatccggctgcgagcgttcttcaggaaaggctgataggctacgcagaaggcctagaggaaggttagttgaatacgaaaccagcaaagagtgagaaagcgcaccttgtcaatatataaagaaagaatgatcttcgcccatttatggaagcaaataagaaccggtgaatgatattgttcagagcatccggtgggaccttcgcctggaagctctgtgtcggaagaggggccatcgggggatttggatatagaaaacgctcgacctggcgttgacaggttatcaacatccttcccctctggaatcctgttgatgatggaattcagtctcagctgcaagtcaaggagtattgaccggagctcctccatgtcctgcctggtgaggggctttattccaagctggattttcaatattcggcggatagcgcctggtaaagattagtgggtgggttttcaggggtttgaaacgaaaaagggtacacacgagccatggtatatttccctctggcggtcagatagtagacgttgaccattgatggtccgccgcaaatagtggggtcatctggattatcaggcagccgctctcgcgaagcaacctgtttcatataggactctgcagcggggctacctagcatcgtatctttcatctcactagtctcgcacacatcccaataattctcgtcgttgacaagtggaggcagaccgcttgacatcgcaacgacacagtccatgtggatgatgtgccaccataaacggcgccggtactcagcttcgcatggctctatgccaaacttagcgggatcccgatgcaagcccatggtttgcgcaaccctcatcgcaagactaacaaagagactagtcgtcaaaggctcctcctccttcgtgacaattgtctgtacgagaagataagcagcaaggccttgaagtgaagggctgcgcgggaatttgatcttcgtgagccatttagtaacttcttcagtatagattgtcgaaagggccgaccgcgaggacacattaaattcagcttcaattgctcggatcgaaatagtcactgagccgccataccatatcgcgtataacagtgggatgaatgacggatttgggcacgactctcccgaatagctgctgtagtcgtaccaatcccagaaagaattgtagagcttgaggatagttggggggtgaatgataggactgatagcgtgtacaccggaaataaatcccttgtaaagaatatggctttgccgtctcgttggcatgtgatcaagcatttctggctccaccaccttttcattgatcgagggggagtcacctgaagggaagattatagattgttggaaggaacgagacctaggcgccatcgaaggtgccgagctgcctattgattctctccatgactgttggccatcggcatgcgaatctgttatgtcttcattatttttttcaggggtagactgatcatgtgagctattttggtctctcagtaattgattgagctcattgatctagatgcgagttagtcaaactgtctgccagttggagagtcgagtgagcagcatacttcgccagagatataagcccaatacgtggtgccaacatatctatttatttagggttagaaaaaaagatttgtattctcaaatgaagcaattttgaccaaccttgaccttccaccgtcctctaggctcaaatggcctaagttcaaactgccaaccgggtctaccagatcggtggcctgaccggatggaattggaaattcatcgctgctcgattctgcagcaatgcgacgtggactggtagatcttggcggtgttttatttccgtccagactattgctcggccgtgagtcatccaactgtgtgggttccacggccgttgcctgtatctctacatcctcgagtgtttgaccgttccttccgaggcgctcaatcattgacataagcttatcgagtcgtgattcaatggcgcttgggtcgggcttttcgcctgtcgactctgcccgcttcaagtgtccgtaaagtgattggagctcgtcgacatcttcctccaatgtccggggcatctctcttcttcgtttaatgccgtgtatattttggggagacccatcgcgcctatcgtcatctttttgggatgacacatcatatatacactcggtgttgttcttcacacaatttccacatatggggtgtatctagaagagatatgttagcctgaaacaggggcttgagtgttgatggcaggcatatcaatctaccttgtcgcatttgaccttccgacgccgacacgtgtgacagctgtagctcgcgcgatttcgggtgatctggcggcctccagccaaaggtcccctcaatgatgacggagcagacgagttgccagggatggaaggacccgatacgggctgagcattgggtgggctctggttcatagtccctggcaagacatgaaaatagatcaaattgttagcatgaaaacgagacgcgcaaaaaaagaaaaaacggcgcttcgccgactgcgggggttccctgacgttatcggagaccgaagcccaatgatatcactccatgccgaggtcagcattgatgcctgaatttgcgggcaagaatatgatttgttgccttgctgtcactagtactagggcttttttttttttttttgccaaatatgccagtaaatttgtctagtttttgatgtataatcttccatctgtgcgcaggagaagcctttagactactaacacgtttatggcaagatatcggggcaagatcttttcgatgcctttcctgcgctgttcaatgctgtgtgtgggtttgtcaagaaagctcagaccaaaagaagagacaaatattcaataaaatcgtattacatgtccagctttacctaggaactattatgacaggaactaaaactgtatgtctaagccactgtcagaagtcggacagggattctagtgtgcaatctgtgatgatctatagattgaaaggaatctttacaagacatgaatgattcaaaagcagatgttccatagagatctgcatagcgccattttatttcgggctgtctgcagtgttctctcgtagttctacctgaaacccgacggtatactgcagtattgggctccttgtttctcaccacacacgctaatgcaagagcgcctcagatgatgtctcgtagccaaccaatccaaaaacctgaacgctagccagctgtacattcccccctccccccctcccaaaagaaaaaagcaccaagtggcctagaacttgggattcgctgtaaaaagaataacaagcctaacatttaaatcctgacgatttcccacgtattttcctagacaatattgcatcgaaagctaaataatattcacaatgagttttggagtgagcatcggggacttcatttcggttcttactttggctaataagctccgaagagactttgttggcgctccgagccagttcaacagtatctccagagagtgcgtcgatattgtacacctaggttgtcggccagtaactgataattttggtcttacagggtcagggggctggcaattattctccaggatgtcgatgttcaactactgggccatgataccaatgatcaacaacaaaaccaactagggcaaatcagtcacagctgtgtgatcctgctgaacgagcttcaaaatgctctggagaaatataaactcgttgaatacagtggcacatcaattcacaaaaaagctagaggtatttggaagaggattgtctgggagccggaggacataagtgagctccgaggtcgcctaatgtctaatgtgatattgctccagtcatttttgagtgctatatcaaggtatcatatatacttctccccttctgccccacctgccgcacctaagcatgaccaacatctgaaatccatagtcaaacgatggctgcgacaaagcaaacactggaacagctcaactaccgacaagaaggcaatgaaaagtcttgcattctcgactggctgtctgccgtggattacacgttacagcagagtgatcttctcggtcgacgacaagggggaactgggaaatggcttctcgattcgcaagaatataaacattggcttcgaacacgccgaggcaccttgttttgtcccggaatgccgggtgcgggaaagaccatctgttctgctatccttgtggatgatttgactacacgctttgaggaccggcccgatgtcggtatagcctacatttattgcaactttaaccgacgagatgaacaaaaagccgaagacttgctttcaaacctgttgaaacagttgagccagcagaggacaccccttccggatgctgtgaaagacctctacaagcgctgcaagactacatcgactcatcctcgattcgatgcaatatcgaacgctcttcactccgttgtctccacgtattccgatgtgttcatcgtcatcgatgccctcgacgagtgcgaaaaaatttgccgtacgaagattttggacgagcttacaaaatttcgtgccggggccggagcaaatgtcttcgccacgtcaaggcctacggatatcgatgatttgttcaaggggggttccgttctggagatccaggcacaagaagacgacgttagacggtaccttgctgggaatatgttccgactcccggggtttgtaagccgaaatactgcattgcaagaggagattatgactgtaatctcaggccatgtacagggaatgtgagtctactttataaaattgattctccgcccaagacttagattgctcatctatcctcaggtttctccttgcacagctttattttgaatcattgatcggcagaaggtccgctaagtctactcgaaccgctctgaaggagctttcggatgggtctcatgactttgcgtacgacaaggcttatgacaacgcgatgggccgcattcaagggcaactgggagagcaaactgacttagcgatgcaaactctatcttggctcacatgtgcgagaaggcccctcacttcattggaactccagcatgcacttgcaatagaagaaggagaatctagtcttgatgaggagaacattccggagattgaagacatccttactgtgtgcgctggtcttgttaccgttgaaaatgaaagcgggataattcgactggtccattatacaacgcaagaatacctcgagcggaagaaagatatgctctttcccagcgccgaaactgaaatcagcatgttatgtgtcacttacatctcgttcgacacgtttggatctgggatttgtgaaagtgatgaagcgtttgaggagcgtctagaatcacatccattctaccgttatgcggtacgccattggggcgaccacgtgagagcgaccaaagatctggatcccgatgtgataggtttcttggaagatcagccaaaagttgatgcttcagaacaagcactcacagtgactgaggatccaatccagaaagattggagccaaaaatattcaagaaccatgactgggctgcacctcgccgcacattttgggattcaaggagcagtagcctactttcttgaacatggttgccctgtggacatctgttataacggcggttggtcagccttgaaacgagccatttcaggagatcatttgagcgtcgcccagttccttctttctcatggagcagatccaaacgaatccggtccggacaacttgaccccgcttttacttgctacccagtatggtcaagaagccattgtcagacttcttcttgaatggggtgccgacgtgaactccccgtgtagatggtatggaagtgcactggtcgcagcatgtgacgagggccaactgaaaattgcagagatattcctcaacagcaaggcagatatcgatgtggatagcgagctgtacgggagtcctttagaagctgccgcttcggcgggccactggggactagtgaatttcctgcttgaaaggggcgctgagcctaattccaagggttctgatgttgacaccgctttgcaatcagcagcaatccagggccgaggagatattgtgcagatattgctcaaccatcaggcagatgtcaatcgacaagcagggccgcatggaaacgcactgatagcggcttcaatgaacgggaatcagcaaatagtgcaaatgctcctcgacagcggtgccagcataaacacggaacatgagcttggcacagccctgattgctgctgtcgcaaaagggcaatgtcacatagcaaagatgttactcgacaacggtgctgacgttaatggtcgcggcagactacatggcactgccttgcatgcagccgccgcgttcggaaatagtgaaatagtgcaaatgcttcttgatagaggcgctgacagcaccattcgtgcgggtgtttacaaaacaccccttcgagcagccatgacgagaggtcatcatgaggccgccacgcttctcaaaagacaggggcagcagttgagggtctgaactttgagtatgcatttgcatggaatacattatagatggatttaaggtatagcagaattcacggtacttggtgttatttttctcttgtttgttgttcggtagtggtgattctcctcctctgatggcaaagcaaagtgtgtggatagtcaagggccgactgaactttacattctgcgatctcctgagaggacccgatgccactcacttgtcagagaccctgaggttgtctctgatacagcaacccctattttttccactataaatggagcactagtattatctgatcgctaactatataactcgaggcaatgaaaagttcacgatcccgtctccaggttatgaaaaaagagaagtcaagcattcactatgacatcattttataagcaaaacctccaatataagttagccactcattgtttatttcacgcccttcgttcaagtgtcaacatggtacctcggcgccacatagccagtactactggtgtcaatccacagctaatatgtcttctatgtggaatgaaactcccatacacgggtaattctaggattgcaaatacaggcgaacgtgatcaaatactcaaacagcaatagaaaaagatttggagagcataacatgtgatggtaccatctcgcgaggtagagaagtcagacttcggcaattttcccacggatatggtcatgcttgtgtcgagtcagtaaggtctcaagggacttccaatcaaatcttcccagattctctaactaggacagtaatcaaggagtctgataccaaataccgtcttacgggcattaatatactcaaccattctgcagaaagcccttactacaccccaaatgatccagaaatggcaagaatcggtggaaggaaaggtacagccccggatcaagtcggcaatgaagatttcactgaattctatggtacaagcatcggaaggcagcccagtcaatacaaagggaaagtggttggatatatcatccatgccagttgctgggtgctcttcaaccaagtcgaagggctcaaactgaaggaggctaaactcgcgaaactcgtccaagtctgtcggaaacattggcgcaagaacacaatgtggaggttatatgacaaaaacgtgcgttttgtacaaccgctccaggacctattgcagtatgaatacggctgcgatatctatcaaaatccactagtgcccaaatttcaacaagccttggattgcgcagatgtcgaaagcctacggcaatcaaaaggtcgaatatcttcccggtccagcaacattccattggaagttgccattctggtcgccgagtgggtctgtcctattaagcataccttgagtgatataaaaaacacggggaatatgcttttggtgttcgggtggaatttgcctgattggttttggcaaagacgattggatgaaggattgttcattgaattggataaacttaagaaggtgatgtctccagtcggttggcaattgcggctgaatttgatgtgtcttgttgtgggtagaactgagttcaggtccagtagtggtctagcaagtcgtgaacgggtgttgaagagtattcttgctcttaaaaaaccctacttaaatctagaatcagccaaggagaaagcgctgatcgagaaggggaagaagaatgaaagtcaatgattgctttgcttgctaagttattcctagtcgtcaattaaagatgtccaagtgaacaatttgcccttttccccatcgctcgagggagatagaagtagaaaaaagcaaaggcacatcctatagcaccttaatttacatgtaagacgagggaggtgggtaaaccatgagactgcaaaacttgtgaacaggatatgatacaagattatgaccgctatgaccaacacgtaatcactcataaaatacaataaatcgaaagcacacatcacaccagactagccacgcttgacctcttgctcaagcttgtccaaagccttggcgtatttgggcttgagtgagtccagtgcgtcggccttgatctggacacgatcgatgttcgaggtacgcgtgatccggccgtccacactggctgcgatctcgttggcaaaccagcggccctcgcggtgagcaaccagggtccacgcagatcctggccggccagcgcgggcagtacgtccaactcggtggacgtatgtagtgatgctggtcgggatatcgtaattgatgacatgagtcaaagattccaggtcaagaccacgagaggcacgatcagtagccacaataaccgagatgcggccttgtcggtaagccgtcaatgtcttgcgagatgcagaggatttgttagatttaatgatagttcccacacgcttggccaatgcgggatgcagaagcgaaatgagacgtgcaagtcgggaggcagactcagatgatttggtgaaaatcagaacagtcttacgtgcgggtgagggaacgagttccatagcatcggattccgagtcagatgagtccgaagaatccgaagaatcagactccgagtccgagtctgacccagaagatgaagtatcgtcatcagatgatctgtcagagctagtatcatcatcggagctgatatcatcatcagaactggtatcatcatctgaactagagctgtcagagtcggatgaatcagacacgcttggagctcggcccccaccaatctcgatgtgagaaagaagaagacgtaacagataaagaggtttgagagatccatcgccaacttgaacaatgtactcagacaaagttgggggtagggcgaagtgagaatctgcatgaatagcagacgggtcatgttcgtctgcagcatcctcggacccgatgataatcatcttggggttagcgagacgcagcgagttgagtttagaaatatctcgggtcattgttgcactcagaatcacctttcgaggaggcttggcgtcaattgaaagcccaagttcagacaaaagcttcccaccaggcccaaaggtctcgggggactctcgactattcagcgagttcatgacaacatcaacccactcttggaagctctcattcaggagacgatctgcttcatcaatcaccagccattcgagatgcttgagggtgaatcctttggtatagcgaatgtggtcaaccagacgacccggggtacagataaggatgtcgacattcggctcggactgctggatgtaacccggaagagacgcatcagagtcaatcgcctcactgacacaatcttccaggctcaagttcatccagtcgtttcctttcaatccgtcacgctgttgctgttggagagccgggttgtaaacctggtccacgcgcatcaagagtttctgttcctctttgatggctacattaccgactgcgcttccgatatgaagtctagatccagaagcacatagttcgcaggattcgcgagcttgtttcaccaactcccgtgtagggactacaatcaatcctcgaagtctggaggcaggtctcggcgacagagcggtaacaagggggagaacataggagagtgtttttccagatccagtcgccgcagagatgcaaagatctcccgggtagttttgctctccttgtagaagaaggggaatgacggtagattgcacagcaaaggcttgtttgtagttctgttgttcgaggattttgagaaggtctggttttattccgagctcggaaaatttctttgtatcctgagctgatttgcgcaacggatttgccagccaagcgggtagagatgaatatgttgggatctgctcgggctcgggcgggttttcaggttgaggtagttgttcaagaccctgtgcgtaaacagcttcgacagtaggtgcctcatctacaacggcttcgggttcaaattttttggctttagcgctggaaacacttttggtgcgctcgaactttgacataatccccgagtgcttgttcttcgatttaggttgttcggcttccggtgcttcaacttcatcttcatttcctgtagtcacagacgcagctgcatccttcaatgtgtcgtccgttccagagcttttccgcttgctctttttcaatttctctgccgtttcgctggtgccgttgcgcgggtttccaacagtcgcttttgtgcggtctgagagagtagtatctttccggggcgtttccggggagttcgatccttgaagcgcatccttgagatgcttgcgcttcttgatactgccatcatctgtgacctctgcgatcggcaagccttcgcgtttcttgtgtttcttcgttggcgtgggagtggttgcaggctgagagccatgggcatctctcttgcgcttgtgagactgagtagatttaggagtcgcatcaaaattattagaggactcgagtcccgaatttttgccggccattctctcgtaattctgccaatgtcggggttgcgctggatacctcgtggggatcaaattccttttctgaatcttttatgccggcagaagacataataatatcaccgccctagctaccgcccttcttatcgggacagcttccagatgtctccagatgtctccaggtctcctgtatttattggctttcatggactggtgttttgagcagcagatctgttagccatggaaaggaatttgaaaagaagagcaaattcgatacctcggagttctcgttctcaccctgagaaccacagccacgatgccgtataacatcgcgtgagtatttgttctatctactagtcgcaatcacttgctaacattgatatggttatagaatggtcagtgacttcttttttccccagtcaggtaagcctcttcttttacgtgtagtttatacaatcgctgacttttctaggtggaattgagagtcacatataccaattgtcatctgtaagcacgctaccttgccgctctacctgcgctctctaattgctcctcagaaactcattgatcgaggacacaaagtcatcgttattacccatgcatacaaaggacgcaccggagtccgctacctcaccaatggactgaagatttaccacgtcccattcttcgtcatctatcgcgaaacgacattcccaacagtcttctccttcttccccatattccgcaatatcgtcatccgagaggagattgacatagttcacggccatgccagcttgagtagcttctgtggagaagctattctccatgcgcgtactatgggactgcggactgtcttcacagaccattctctcttcggatttgctgacgcagcatccatcctcaccaacaaattactcaagtttacattgagtgatgttgatcatgcgatttgcgttagtcatacttggtaagtctcccgccaacgccctggatgactcaactgacaagtttcagcaaggaaaacacagtccttcgggcttcgttggatccattaatggtgtcagtcattccaaacgcggttgtggcggagaatttctgtcctctatctcatactactcgtgcacctgatcagggcctgagctcccccgccgatgctccaatgtccccgagacaaattgggcccgatgatccgattacaatcgtggtcatctcccgacttttttacaataagggcactgatcttctcatcgcatctattccgcggattcttgcctccaatcccaacactcgcttcattatcgcaggatcaggacctaaagcgatcgacctagagcagatgctggaacgcaatgtgcttcaggataaagtcgaacttttaggttcggtccgacacgaggaggtccgagacgtgatggtgcgaggtgatatttatctccatcctagtctgacagaggcattcgggacagtcattgttgaagctgctagttgtggtctttacgtggtctgtacccgtgttggaggcattccagaagttttaccccagcatatgacaacgttcgccaaaccggaggaggatgatattgtgcttgcaaccagcaaggcaattgcggctttgcgttcgaacaaagtgcggacggaccgatttcatgatcaagtgaagatgatgtattcatggcgagacgtagccgcccggactgagcgcgtgtacgagggcattactggcgatattagtccagaagaattctatggttactatccaggtcagggctgggaagcgagcggagatcgcgtccgcagctttgcgctaattgaccggctaaaacgttactacggctgtggcgtttgggcaggcaagctcttctgcctgtgtgtcgtgattgacttcttgatctatgtcttccttgagatgtggtttccccgagccaacattgatatcgcacgaagctggccaaagaagcagccagcgagcaaaactgagagcaccagaagtggtcgctgagaattcgcactccacccaatccttagcgcagaaaggaccggcctgtcaatatctttttggtcgactctcggttctccgcctgtcctgtttgtctcggacagctcataacctcatttaatcacccctcttcacgtcctctcgtgttgcacgacccattttacacattctcatccataatacctcatacataatgtctacttggcaaaataaaatgcctgaaatccttcctgcggtggtgccacctgcctagatggctggtggctgatagttgaccaaacttcacatcgaatagactccattggtatattagcaagaaaatgtaataatcaagaaccaacgccattatgcacctgcgtttgacatcatgtacgagaatgatcggctgccccaactttgaatcaacgcatcaccggaggcctgccctctttattccacttgacgcggctttgtacccactccacagccgcctggacaccagatccaagtagcgcgctgaccggcagcacacgactgtcacggacgccacttcctgtttctccctcaaacaccttccggacaagcccttctttaatgcgaaccacctccacgcagtcctcacggtcctgcttatttgccaacaccaagataggaacaccagccacatccgcattttgtaagactgactcgaggacttggcgacattcgtctaatcgcccgaactcactgctggccgcgttgattccgacattttgctccgagaaggcctcggcacttgcgctccctcgtgtgccattgcgtgtaggacctgccacggagcttgcgcgccgagtaagtcgcgcgatatcgggatcttgaccaacgtcggaactatcgaccacgaagatgatcgcgtggcagctagtatagtagctctgccacagaccgcgcatagagatctgacctccaacatcccaaatctttaaattcatgtccggtaacgctatcgttgcgacattctgcccgacagtcgggacggtttttccggggttgggtactggggcgccatcggagcggggttggtacagtgctttgatctgggagaggagtgttgttttgccggcattatccagtccaagcagaatgacagaatactctaagtaggttaggataatcagcgtagaaggtcatgcgataggagagagcagttaccttctttgctcgtggcggctaagtacagcgacttggccaggtgatacatgatcgcgttccctatggggagctcaaggccaagcgcaattgcaattatagaaaaacgggaccggaaacagaaatcatgacatcgcagtcagttttctgacgttgaagcgctcttcccccggaggggcccgcgttgcagcctcatccatttcggggagttagggcttagggctgaatgtgatctggggatgttccagtccgaactacatcgggcatttcaatgtacctcacagcggtaaaacagcgtgcattcaacactttcaacatttccaacgttcaaatatgttcaattccataacttcaagaaatatgacgctataatgatggacgccacacttccccggcatactcctcgggtccaggttcccaactcagtctgtcttccaaggtggcaaatggaaaaccgtcgactttcccgagtctcctcttctccccacttgcaaacactccgctttccagggtttgtcagcttttaattgatcggcggacctgacgataggaagccaatttgtcagggacgttgacctttccctcctgaattccctgggatacaaatgtcacattcctctatggccttgctgtcgatccctggtgagaaggcagtgtgacgaggatctcaccctgctttgattggatgatctaccctttttttttaccctatcgcatgtctataccagtatgccacacgctccatcattttcttgatatacatcgctgtcaatggagattgacactatcatcgtcggtatgtctatcgtagttgatgaatcattttgaggccattcgagacttttcctctgcttgagccccacaccccaccccgcgctgctaggagtccttgcgaaatggtaactgattgaaccgattttaccaggcaatgggccgtcggccatgatcctttcatacatcctccatggacatatccctttctactcatccgatcctccacatcccgatcatttgttggacgccaagttgaaagctgcgccagatattttgaatgccgatgtgaatgctcttacagcacattttggcgcctcgcgcctatcgtactcgacccaggcgcttcccgtgaatgttttgctagacacacttgtacggccaagtgttgatgtagatgagcccggctgcatctcaaatattgattggcgctcacagcctgagaaggctgtctcacatcttgtttttggaaagtccttgaagcctggaggccaatggaccgaagatccatggggcgcgagttgggatatccagacgttgagttatgcggcaatgctgtccttgcccgggtactcctttgccgcccatcacaaaaagaccacaggcaaagatttaccatcatatacaaggcccacgcgccgcgagattgcggattattttgccgcttatccggaggctgcgcatatcgatgatgcttttcggtgtggcgaagaattgaaaggcatttcccgcaccgctactggattttatgttcattctcataacatccactgcaagcgtctggtcctggcaagtgggatcttttccgaaatcctctcaccagagccggtcttacgtccattacttgagaccaagtcctcgcctaatgtcccgctagtcgttgttggatctggcttctccgctgcggattctatcatctccgcctcccctgaccaaaagattctgcacatatacaaatggtcgcccaatgaccgcccatctcctctccgggcctgccatcagcaagcatatccagagtatgctggtgtttaccgtcttatgaaacgagctgccctcacagccgaagctgctggtaaaggccagcggccaaagtaccgacgcgcgacttcaacgccattccttgaaagccggaattgggaagacctctatgaaggtctccctaatgttgaagtgacgaacgtgaaagtccacggcgacctggcgacggtcacattccgccagcaagatggaactgtcttctctcggaccgtggccggcctcgtgtatgctgcaggccggcggggcacgctagattaccttgaccccgagctccgctgtgaagtgttagggcagggcaatcaaaagaatccagtagtcaccggtcagaccctccgtgcgaaagcaatcgaggacctcgaggtcgcaccgggagtttacatcatcggcagcctgactggagattctctggtcagattctcatacggcgggtgcgtgtacaccgctgggcatttgatagacggcgagcgggacagtcgcagtgtctgtagtagtctcacgctatctgctaaactacatggttcttcgctttccgtgatgaacggcatggacggacaccatgtctacccgaatgacaacacattggacctggctcgcgaagataccttcagcaaaatgtcaaccgtcacgaaccagtctgttgtacgtggttggtggaagacactctcccgcatgtggagtcatctcacacgatgaggatttcgaaatacgttgcatgtacaccacgatccccaaatgtaaaattctagacacgccaagaaaggcatatatattgtttatctatcttgtttctaaaggattttgttccctgcgtgctcctccaaactacaatgaaacctacaaaatcccaaatccaagatgcagtagaacatcaaatgaaactaccgaagtgatattgacattcctggttagacaagagaggtaagcagtactagcgatcacctaaatttcggtccatcctccttgatcatatcagccgctttctccgcaatagcatacacagtagaaatgatgttcccactgatctgcgacggaaaaacgctcgcatcgaccacccgcagtccttccaccgatttcacccgcagtctattatcaaccacaggacccattgcgcacgtccccaaaatatgattgaagggcataatccgctcacgggcaaactgctgagcctcagcagggacctgcaagttcacagccggcggcggatcaacacgtcccagcacactgccagccacatccttggacgagaacaccttgtccacgaaagccaagccagctgccaagacatcaacatcggcctggtgcgtgagtatgcctagatcgatatcagggggtccttggagggatccccttggtgatatatgcgtactgccgcgcgaagcgggatacatggcactgatcaacatggtgtagcatgcattgcgacctttcggtgctcccggcagcagcaggccttggttagaatggccgctggcgagattgaaatggccgggaatgccgtagtattggatcgttgcgaagtcggcatctcataggctggatacgatgtgcttgcgatagctttctcggaatttgtccccctcctctggggcttccacggcggcgactgtggcctcgattgccgtctttgggacttgggatgcgtagggaaggaaccctgtcaggcccatgcagcctgcgaggagtccgttttgggtgtctgccaacagcttggtttgttgctgaagaagattatggtctagaaacaaggaatccatggtcacaatatccggcacgagttcgtatacggcggatgtcatggggtgttcttgtaggttttcccccacggcgggcaggtcgacgattggatcgatgccggcagattgaagaatggctcggtttccaattccagagagctcaaggattcgaggactttggatagtgctcgctgataggatgatctcttggcttgctttgaccttgtgctgctcgcctccgtgccaaaattccactgcgcttgcccttgttgcctcaccaatgtggtcgaaaataatccgactgacagatgcttcggtcaggattttcaagtttggacgttcgagggcagggatcagatacgcagaagcagaatagctgcggcgcacttgcccgccgctgcggtcaatgtttgacaggctttcaaaagcgcctatatgttggccaccgtaaggatcgtcggatcttggaatccctgaagtgttttcgaggcctgtgaaaatagattgctcgaatggaattggcgagggtggcatagagagtcgaataggaccctcttgcccatgagaagctgaagacaggtgtactaaattttttgtactattcagtgggtgttggaggtcttcgtgcttcaggtagtagggctctaagtcgttccatgaccatccggcattctcttcaccccacgaatcgatatcagaggccgatggacgaacgtaggccatgaagttgacggcgcttgagcctccaagcaacttgccacgggggagatgatgaatttcgtccttgttccccgcctggtttggttcaagggatatgtcagctcatgtacttatttcaaattgattaggcttcccgggcatggaagggttatcgtaacaacgccaacatacttgcggtattgtcttgaacttccaatcatactcttcgttatgcaacatggccgatatgccagtcggggagagtacattgttgtcgtccagcttggcttttccagcctcaatcaccccgacaacgacattcggattctcgctcaaccgattggcaaggacaagtccagcagtgccaccgccaataatgagataatcgaattccgtggctaagaattcgctacaagtgggaaatgagtaatcagccttcatgatgagcagcagaatgtatgttgtcgttgaaagtatatacacaatgagatctgcagaggaaatggcaagctatttatgctgatactaagtcagagtcgtgtcgtcatatctacaaggccagagctgtcagattataaaccccgtactccgtactccgtacatgcctcttatactccgtggacgcctgaatgcggaattagtatccgggctgtcagaagtggagcttagggtttcgaccacgacgatggtccggtaacatacaccgccttacagggtcttacagacagtgtatttttgaaacttgtatccgtacctgcagagtcctgcagggtcccgaccgagaaagcttagccaatcatcgtacaagcacgtggttgtcatcagaaatacgaaaacgaaagttaatgatcgggatttgtaagagagtggggatctgacggggtctgacttgttctaagaccatcagataaaaaaaggactccacttccctgcatgtccgacttttctttccgtagacctattaaggacatttgtttcaccgggcaaatttggcataactgctatatccttggttttttatatattctcggggaataaggaggtcgaagcacaaagcacttctatgattccggcttcctgggaggtaccgaggtacaatggactaaatctcaccgcggccatccagttgctattccggccttaaaagtggagaaaattgcttgattggctgattcttggcattatggacagtgacatcgatcttatctcacccctcaacatcagttcgcaccgatctttgcttaattaagtaaaaggacagtccattacggccgaaacctttcattaggtctagttcatagatgattatgccagatgcacagatatctactttcatcctgctaaatccgaacatcgtggccaccgggcaaccttggaaagcatcagcgtttctaattaaattgcctatcctagcttacggcggtgtgacagtctgataaaaatagtagttagttatatagtccgaaaaatgtgtgactaagtaagactaagaaatttactgtggggaacaaagccacatgtaaatgagggtgctttttgcaaaatagacaagttacttggttatccatctaacccaccccaacgaggtacggagttagagccgaatatagattaatcagaccattcggtaaagtcgggacttcagcctatctcgtccttctcaacttatataaagccaggtacaagcccgcattggcatgaatcttaaaaacaagccactgttcaactatccaaccatccaaccacccaaccatccatcatgcgtctcaccgtccttctctacgctgctcttgccggcctgtcgctggccgctccagccgaacccgccgaagccgccgatgctgctgccttggacaagcgtcaggcgagctgcgtgaccatcaggaaccaactcgcttcctgtgaggctgaaggcaactgtggcactgtcatggcccagtgcatcgctcttcactgccaggtgagtttgaatttaaacgttacgaattgtgcccacatggataactaactcgaaaatagcactgcgccaacttctagttggggtcaattcctacttctcttccaaccgaggtcgatgttgataaggtataagcccgtctagaagaggtagtccctcgcattcgctgatgattcgtctggcagctcctgcgggtgtaatgcccttctcggaaagctggacatatagagaaaatgggggataaaggccgaggccgatttaggcttgtctaggtctctgcaaatgtttgatttttggtccatagggctttccgatatcttcattcaaatgcagtgactttttacctccgctaattatacgcgctgtttccaagtatcagaatcaagcttgtagagattcatatatagtttgtcccactgataataaataggagtgcgccattgggatatccctagatcgagaacgatggagtagcctcaagtagaactgtttagctgaatacatgtcgtagtatttgcactgattaactttgcactagggtggtatgtatgaattgttacgtgcgggggtcttcaggaaaaatagtgcattctaactagaatattgaacatgaggggggaaggaaaggaaaagaacagggatcggggccattgtaggcttttgtgcccttgccctgcaactggcttatggatcaggaaggaacgactcccacaggaaaggaaggaaccaacgagccttgatcgaaatatatatcaaccctccgaacctccagttttattgtaatcagcctcgaagcgttcgcaagtctgaacaaatgacgtatcctgctttctccatatgacccaaagccttccaggaagacaacattatttaaggaagtggatttcttgaatcacgactcatggtggcattagtttactcatttttgcggcaagggtagggctttcgatggcccacatatatatatagtgctagtctcaagtaggaaaggcgggtgatgttccgcatggaacccgggaagcttagatatgcttattcgtatttgctgttggtcattgctcctttctcttattggggcattgggtattgtggcttggctctgatttgaaaatgatgttcagcagggcttttttatcaggttagaattactgatctcgtgaaatcaatggaccggagcgtaatccttgtatctgaatcaacaaccagaaccatcttcacgtgataagactagctacacttcctacgatagtagccaatgacaccgagtgtggtacaatctgttggatcatattaagttctcttgttgagacaactgccagcattgcattcacgaaatcaggtagaaatgttctgccagtatcggcacaaatccttagtgattcgcacgaatgtagtctaggatttgctggatcaaaacatcgtcgtccaccaagtgatagatattgccactaggatagccagatagcccccaattgagaacacattcgttctcatcgtcgtacttgaacactctcatcaattttccgatggcgacaaagccgtaaactgggcggcggagccagattggacgtttgccgtgtgtgtcgctcaggtattgagtcaattggttcaccccttcctcccaacccgatggccgggcctgtaggctctgtttcttgcattgcacaacaagaaagttggtgggaattgtttcgaaatccatataatgatacgtatggaataagagttcattttcgccatggaagcgggtcacgtagccggcagagcagggaaattggagggcaagaatagagttccaaactccatagattgttgcgtcggggtcgtttcgtttggtacgatcgatctcttcgtagatggcacggttggttaagtgctaatactagttagcagcttgcgagtaaccatgttgataatacttgacttaccgtttctgccatgggaggcaacaacctagcaaacaaccttgtaacaaaggaaagaagcaagcatatgtcagcgatcataaagtcatatgatagacaatcatgcagatggttacaatagtaactaatttgtttgagagaaagcgaggattttcgattagagggatattcgccggcttgttaataaaatccctagcctattgtgtcgtctcatttagactcccgaggccagtcgtcatagacatgctacctaatcaccaccgaaaagaccatagagacttaacataattagcgcctacatcgcctttcatgccttactcattgagactccgcccgtcttttgcccgccgttagacgcgggcctaaactaggccgctacactcattttactctccttgttcttcttgtttcccagctgcttgctatctagagtcctttcgcatttactggtcgatgccaatcgccctctcgtggataattgcttcttcctcttttccgtcatcgccaatgtcggcccccgtggcgccagtcactccctagccgtagcttaccgccaggacagcgacagcgacatctcaccgtgacctctagcacgcggagagcatgtcgtggcagatactctcgcgctgatcgaaatctcctcggacctcgcgaactgcgcaccgcttgggcggagacggggctctcggagggctggtatcgtcggtctcagcgggcaacgaggtagagagtagtgagcggccaagcttcccaattgactaaattttgcgcagcccttaattattagagcccggagattatcccccgtgctctaatccttgacatggacctcatatcaatgccacttactgcacctccctcgtgggggtataaaacagtcaaggttcgagagcctatcatccgcaccgtgtggcgatagttatgatgtgaaccgcagtctttctgtaagtgttgtttagatcaatgctcgctctgcgcgacacctaatgcatgaagtgcatcccgaagttatgaagccacttgaaaattcctcattgtggggcaccggcctccatcaacagcgaattattgccgatggtcttttcgtcaaggtgaagttcggcgggatcctgtataagtataagcagattatcgatgttgtccatgtgcgcagttcgtggtgcctgtgtgacggggtcaagcgcgaggctgttgtggtcgaggcatcgggtggtaagtggtaagcatccaatttgtgcagatttgtgaacaaacccaaaccctctggtcaagtcaattgttccgagcctcgatgttcaatcatgttttggcaccgtccatttgcttagcccatcggtctgtaaaagagtgatcgctgcatgttattacctttagagaacccctattagtcaagcgggatcaactcggcgcctccaaacatactcgtatcatctgtcctggggcgaatagggtttctgagtgcataattggtctgagatagtgcgttcgtatactttttcctagctcggagctccatttgtggagaaaaacgtatgttcaacacggccgctaatcccactgcggccagcgcggtgatcaagggggaattccgagtgttcatccaaggcagcggatagggcatggggccccgtagggatcaccggacatggagttcacgaagatatgaccctttgctaatttctggactgggtaaaccagactgtttattggcggggtgacgttttgagcgttgttagtggggggtgctagtgttgctagtggcgactatgcgcgttttgcgtggctgctgaaacttgtttgatcctgcaaaaattagtacaatggcattatggatctcgataccctggacaatccacttgagcccgcatacattggatacgatggtgatccttcatcgcactggtggggcaatttagtgaatggtttcttttctggcgtgggcattcattctttcaagcgacgttgcgacagcgggatagttggctttccacattaagccatctatttaactagtggtgatcttgattgcgtaggtgctaaaagaagaagtcgatacgttcacacgttgagattgagatgaaacagaaaaccaatgttgagcacctcgtcaggatccaggctgtcagagcttattattatcctccaatagaaaccacaataatacgccaaccgtttaagccttggagaaaggtaaaggctcgaatatgaggactagtcaccccttatccaatgcgatcagcagctaaccctatttcctattagggctgcatatacaatccctgtctctatatgctaggccaactactatatacttcaaattaactatgatctacgacgtactgtcccatggcttactttatcctagttatactcaaattaaaaatgaaacggttttctcatttccccccttttccccactgttattagcccactcgtttaatgtgaaatatggccccatacatactaacggaaaccggttggtcccaacggtcttcccccttcagttgccggtcgaaatgccttagacgccatttcgtactcatttcccagtgtagatctctattccgaatgtcttccgacataattactcccgataatcgggtagaggaccgtttcttccttatataacatctctcctcgtcctacgaatctctgatccatactttcctacacctcatttctaactaataatccctcacttcattctattccctgaaacatggctgaatccaccacccttatcttcgttcccggcgcgtggcacggccctgactactacgaccccgttgtggaacgcctggaagcagtcaactacaaaaccgacaaagttcacttgccctccgttggcccatccgagtatctcttgaacttcgatgcggacgttgcgcaaattcgctcccggatcgaacgagcagtggatgccggccaaaaggtcgtcttgattgttcactcttacggtggcttgcccggaagcgaggcaatcaaaggcctagacatcaagacacgcgagaagaacggtcttcccggaggtgtcacgcatctcttctactgttcctctttcatcatcaaggaaggagattcgctgattggtgcctttggtggaagtgacctcccgtggtttgttgtcagcgacgacaagttgcaagtcaatcctgccgatcccgtgggaacattctacaacgaccttactcccgcccagattgagacttgtcttgccgacatcaagcctcacagttatcagaccatgcacagcccttgcacctatgccgcgtggagagatgtgccaagtacttacatgtactgtcttcaggatgctgctattcccattgagattcaaaagggaatggtcgaaggaacagcaggtggatatgacattaagacagagacagtggacgcatctcacagcccattcctcagcaagcctgatgaagttactgcggcgattcgtcgggctgctggggaggttgtttgattttttggatgagtttacaatgtgttgtgattcaatgttttgatatgagtgaatagcattagatatcagtgatgaatttacttggatgatcgaattaacataagaatatttggtatatacatgaatatcgtggaactaccccgtaaaatatataaggatgcccattaaaatcatatacctcacactatctaaaaaaatagatagctgaataattgatggatgttcttcttgagctccaaagttgtaccccgggcagcaattcggtggcaagtgaatcatggttacatcaccagccctaagaggtctatatagtccggggtgatttgcttatcaacttattattatagtgatttaattcttttttagcctaatattaagaacgtagagaggcggaatataaaaattccaaggtggcattgactagagctatccttctcatctcgactttctttccaactatcaaaagatgtggccagccgatgacccaatctcagcctatggctttacagccgttttatcatcggctactactcttctcgcaacagatcctccagtaacaccagccccatcgattgcagtgaccgaagtcccgattccagcaacgtccctcgcccagcgaatcaatgaatatgcaaaatctcatcttcctgagccgacatacaaccattcacttcgcgtttatcactttgggcttgcgattaagcggtacagattccccaaatggacatttaccgatgaaacatatttccttgcctgcctgcttcacgatatcggaacaaccggacctaacttagaggccactaaattgagctttgagaccttcggaggcctgaaagcactggaagttctgcagaacctacagccttcctttgtaggaagcccggtcgcagtcgccccgaaagatcaagcagagagcgtggtggaagcaatcatccggcatcaagacttgtgcgagaaaggtaaaatcacagctctcggtcaactacttcagctggcaacaatcttcggtatgttgaccctctatcagagttgattgttttggcataacatattattccttgaacagcgaccaaaatggcgtagcgctatttactggccccaacaagtgtacaaatgttggctctaacttgctggaaaacagacaacactggctcttatgccaatctcattcatccctcgactatccgagatgtttccacccatttccctcgtctgaaatggagtgggtgcttcgctagtaccgttcatgaagagaatcggcttaagccctgggcacacacaactacacttggcgaagacgaattccccagtaaggtgctaggaaatactctgatggcaccctatgaatgatggcatctcgaggatttccaaagaatatctggcatggagctcataaaccttttagacgctaacaataaaagttgacaaccgagcttgcattcttccgatgacctatattttcacaaacatatattaggcttcaagaaatataagtatatcttaaattcatacatcaggaatcgtattattgcggagcgaagcggagcaataataaatcacgaggtcttaggtgtatgtcatgtgaccaagatacgtctgaatatcccatcatgtgaccaggtaaatgagctagtgctggctagctcgttctttatgcaccaatcaaaatgcatttattctatcattatggctttcaaaacatgcactagacgcggtcactcgcgtcctttggagctatttcgctcgcgcgctagcaatcgagagaccgatcagtatcaatcttgtcgagatgccaaaaagagagagcgttctaaacgccgtgcggctaccgagcaggcgttggcctattacatcgtccccggatccctacatggccttggaaatttgaatcagtcacttcgctccgcaatgactatctggaagcttaaggccaccgagatcccaggggcttatacattggttattgcgatggacccaaaaatctgccgtaagctggtcactgaatggtctcatttactcctctcactcccagactgccagttcactcctagttcattcccacttcactcccacttctgctcaccccaactcacctcctcagctgactctcaataagcgacactcgcattcaatctcaccacgatcaactatggagtcatctcataggaagggagagtgcaggcgtccaggggtccacaacggagaagagcccagattgttgctggaagcctgcaagtcgcccgcctggaagaggcctaaaatggccaacagtggtcctgaaagcagaatggtctgaaccattgactaaattgaaacaagatgttttattctgcctgaacgagtcaaaccaagaggccaaattctcattgactaagagtcgctcggaggggaggaagactatcaccattgaaaagtggacagctgacagggattctgtcaagcccatccaagccatatgtatcaccccaattcgaggtcccaattcgagcggccatcagatctcagggtcattgaaaattccatttctggactgttttcttcgcgcaaagaggaacgctgagatgcattttactctatcgcacgatacatgctggacattggagaagcattctaaccctacaacatcttccaggaagataaaagatcgtgctgaaattgtcaagatctgtaccagttggatcgataagcgggggatatcatggatgctgatcccactggtggcgggggtcagacttcggtccgtcagacaccaacccaacaaaagcacagatggagaggttacgaaagctctcctaccaggtgtaggggcctcacccctgcctactgctactcacaatttcctcttaccattccttcttcgtctcctgtcccataataataatagtaaacgaggcgtagtccagggagatgaattgatctgcccgcttgcattcatctctaggaactgaaaagcacaataaaatgagcaagttactatacttcaaccccaaagtagcgaaattgtccagtcggtgtagagatagatatctccccgaactcggacaacacaccttcatgaatcctccacagaagccaaacatgcttcgagccatcctcgccacgttattcctcctcgtgccattttattacatatacaaacctccaagtctactcattcgttactgtcaacggcgctggccggatgtacttttccgcgtagacacagacaaaaaagtggttgcgttaacgattgacgatgcgccctccatacacacacctgcaatcctccgtctattggaatcgtacaatgcagctgcgactttcttcgtgataggatctcagatcccaggacacgaatctgtcttggctgacctcgtccgggctggcaacgaactcgccaaccatgccatgtatgatgagccatcgcgtgcactcagcgatgacgtcttggcagatcagatgcggacagtccatgctggaatccaggaagcctatgtcgcggctggaaagacagaacctgagaattggctctttcggcctggctcgggggttttcagctcccggatgcgaacgcttgtaaaggagctgggatatcggctggtgcttggcgatgtgtatccgcatgatccgcaggtgccattttggaaactgaacgcgagccatattttgagtatggttaagccaggcagtattattgtctgccacgatcgcagggagtggacggtgcctatgttacagaaggtgttgccggagctggaccgcagagggtaccgcgttgtcacagtctctgggttattgaaagagattggcgtaaattgatgttcaagttgatggcgaatgaatattgcgggctatcaatttacatatttcttctcgaaacgctatgggtatattcggacactattctcaacaggctagcccatcatctgcaattgatcctccgggggccagcggacttgcgcaaagctcaagcagcgcttgatactctgtagatatttgcgagtaatctcgtcactcagaatgtgtgcctgctggtcactttgatgcagcttctctcgtgcagatcgctcgtgaataccaaccatggtcacaccgataggccatgctctatacacatgttagtgccggttttaaatttaacagggtgtgggtcaacatacgctttaccgatgctcactcgtaggtaagcatcatttgcatcgacatatcgccgctgctgcgccttgtgaacgatttcaacgatcggctccaacagcccgtcctctagctcagccttctcgaagaggcgaaacaacggtgtcatattctcgcgtgattgggtcatggcattgaacgcttgttttccctggaagctttcccgcacagaaacatcacgcttcgctagtgccagttcccattctgacaaaaccatgttgaagtaagatcccaactgccggaaaaggaacagacggccctcttggtctttcgggatcttggccgggatgatcatctgtccaccaggcacaggctccagagtggtagggataggtccatcggtcaccttcttcttgggaatagcggcacgttgaaccagacgacgatatcgtcgaagacgggctcggtagtcctctccaaacaatattattggcgcattcaactctcgtaattttgcaataagctcctcctcctcgatatcttcctcttcgtcgccgtcggctggggtgttctcaggcagctcgggcagaccgagtctccgccgccgttcacgttctttggctgattcttcttgttctcttctcgtcttggactcctcggctagtcttcgcttcttctcctcgcgttctcggtttcgatccgcttcttcgtcttcgagcttgcgcttgttcgccatgcgctcttcacgttcgcgtgcaagtctctcttgctcttctttgtaggcttgaatgcgggcagcttcgacatcgcctcgtcgcatatatttctttgctggtactggggagctttttgcggtgtctttggcggatggtttggaggaatcactacccttagccttagagatctccttggacatcaacgcggcgaaatccatgttgggtgatgcagcgagctgctgaataattcgactgtagctcagttaaaagaatcgagacaataaagtagagttgcgtcaagagaagaagatggagtgtggaggcaggaaaagaatgttcggctttgcacgtcacccgcagctttcgacgccgcatttgtttcctccagtcaactcccctcaaccaaaatacaccgaacatttaccttcaaggacatttatccaagctttaatctacattcaactgatcggatatctcattatcttctgtttcttgccgtcctcgggactgccctaccatcatcatggctgctccgtcgcgagagggctcaaaaccctcaatcaaccgccagaccaccgcacctttccatttgaagctcttctaccgagtgaataactacaaccccctatccgactacagcatccccgcaccatctcgtcgcggaggaccagtcagcggcccaaactccatccgcccaacatcacccgtcgcatctccagcgccgctcccaccacacctggagatctacacatggcaatcatgcacactccgcgagctctcccagctcctcacttccgccctcccatcattactccccgacccgcctgtcggcacccgtctctgcttccgattgatctaccccgacgcgcgcggcgccgcaatgggcggccccgatgcgcgaggccgatacctgagccgggatttaggcagtgcgatcgttgggccgagggatagtccattgcgcgcagacgacgacgaagataagcaggatgcacgacctcgccctggcccgctccggttccagggctccgaggccgacaggcccctgcaggaggctcgtttcatcgttggggactacattgaatgcgcgattctcgcgccgcttgaggatgggtctgttgcgccggcgcttaatggtgcatctggtccgattatgggacctagagggggtggtggaggtggcatgcgcgcgttccgggataatggctttacgagagggcctggtcgtggtggtcctcgtgggggaggaggtggtggtggtggtggacctccgaatttgcctcgaggtgattggcatcgtggtgagcgattgcctgaaggtggacgtggaggccgtcgtggatgggcgccatattgagaagcgaaagaaagctggctcaaaggcagttttgtgaaaagggcgataaatacccatattatgtatgactatttagtttaagaccaatggaatcagtaccatctactacatgcactaccgttaacagaaacaagaaccatgtgcctcctggctaaagaggcgactagagctttatattgcagtatttcaacaaaataagtgtacttgattaaacttttgaagatttcagcctcttcaatcgtcgtgagtagctaagggtgacaggcattcatcctctagtcatatgacatccaggttagtgacgagtagacgcctatcagaagtccggacactgaacgagtgaaaaccgtctactacgtagaatattccgggtcgtacatctaacctcagaagtaaaccccagtttcacagccatgcaccaaatcaacaaaaaagaaatccatgcggtatatgcttgtaataaagtacacggccccacgacagacaccggcacaaaaagagttgaattcatcgggcaaacaaaacccccttccacactcggagtatccgcaacctctctcactcagtgtgtagttctccatatggcgccatgtcacattcgcagctcggtacggcttcgataacaaaacaggaattgaattatcgctagatgtctaccattcggcgatggaatctcctctgcgcttgccacggaactcgaacttgccctgcgatatcgttagcgcgtgtttctctctccgcaagatcagaccacaatgtgcaattgcaatccaattcaacaatgcgggattccatacatcggtcttgtaggcgaagtatcctaggatgccggggatcaggccggcgtagacgaatgagatccaggcctgacgcggggtccagcgccagtacttgtagcggttgatattgagttctgcgggtccgttagtcaatcttcaattgtagatatatcgtgtcgcggcatgctggttttgagagagatgctccagtagctcgggtatggttaagctagcgtgattcgcgaggctcgtccggggtcctggatcgtaggagatggggttgggggtatgtaccatagtatctctggagggccgggtcaaggatcacggctgggacaattattagcaaatcaggtcgcaggattcgtcaatttctgaaagctcacacttgttatggccagccattgttgcggatagcgttggagcgtagacacagaatcgtcaattgcaagcgtctctaggattgaagttgaaggtcacatgatgatgaatcagctgaatgatgtaatcagctttcgtcctcccagctcgtctatagttacgatgttgtgcatttcgagatgaaaagatgcatattattgtgtctctatacctaattgttcttcccaacctttttgaatgttctcattatcgatttctgtcgtgcagaggtgtggaggatatccgagatgatccgccaaccaaatgtcctccatatgcactgacacagcgtataaacaattaactagttaactatgtaagactcgagacattaatagtttccaaaacccattgcgccctttcataacccgaattacatggaagccgagaatttcccctcgatcgcctcgatcttcttcacagcacgctggtacccctcattgttctcgaggcgcttggcatactggataataagagggtatttatccttgttcttctgctccttcagcgctctcccggtgacagcaatgaccgggaaactcagcaggatatcagcagccgtcaactccttaccgcagatgtactcgccaccctcaggagacgtgcggagctggtcctcaaggaaagcgagattaccatcaatgttgcggttgaggaagtgattatccacttgggcggcaaccatgccggtgataggccgaatgaagaatggaggggcgttccgaatagctgttgaaaataaatgtcagctgcttcaaataatagttacaacatacacatcgggggccatgatccatcaacgccatgccatgcatgcatgcatgcatatgcgagaacgaacgaaaatgtacattgtacacgttgaccgctcttaaaaaaaagaaaagaaaagaaaagaacacttactgtcgttcacaagactcatgaccaagaacggcatcaggctgccctccacgtagtgcatgaagtagcggtagcgcatccactcctcggtctctccacccacttggccctcgctgcccgttgtgtagcgttgtggtactagcgtcgggcgcgcgttaccaaagtggtcacagaggtattccatgatcgcccccgactccgccagcactagcggttttgcggcgcccggtgcttggatggtcactataggtgacttgcccagtgggtggacctctttcaactcggccggagcgagcttgtcggcgcggcgtttgaaggtcttgagttcatattccagtttcagttcttctaagagccagaggatgcggtggcttcgggattgctcgagcctggatttatgttagttagtatgattctgagcaatttgtgatggggcgtaccaatagagtgtgatcttgcagccttgattgttggccatgatttgttaatattatgaatattgtatagttgaaataaaaaatgtcgagtcatgaaaaaagaaaacaggactttcaagtttaagtgcccacacgtggatgatgtcaagatgggaccgaggcaggtttatctcccagaagggataaacggccgagactagctgatcttgtgttcatatttcgatcttgttgcaatattgattattatatcaatcggattcagatcttactgtgttgtgcagtgattattttatcatgtgaagatgtctgcttggtgcggcgactatccgtcgtcaattatgtatttgctgcgtggcttatcgacctgttcgtgttgatcttccccgcactatcaggcctcaccagctatacatagattatatagattattcagctctgcagctaagggagcattgatgtgagaaggacctggatcgaggctgagcatctcgtattttcatgacagatcacatgtgggtgttctccgcggttgaatatatattgatacccgactattctcgcctgtttacgagcctcatatcgatgatgaataatatgttgattcgtagattccaaatacaaacgcatgtttatgtctatatatactccggctttagagtctcaccggctccgcgtcaagcggaaccaacacatgtccctccgtaaccaaggagttcttgcacgagcgagctgcagccaagtccgatagattgccgagtgtaacctcagcgatctcctcgagggcctcacgcgtgaagaacccctggtgaccacagatcaagacattagggaatgtcatcagacgcatcaacacatcgtcgtcgatgatctccccagagtgatcattatagaaaagctcgccttccgcttcgtacacatccaacgccaacccgcccagctgcctcgtcttcagcgcctggatgacagccgtggaatcgatgagtccaccgcgcgaggtattaaccagcaaagacccgggtctaatgcgcgccaacgtctcctcattgataagatgcttcgtctcctccgtgagcgggcagtgcagactaacgatatggctctcctgcagcagggtatcgagatccactagcgtcccatacggacggaactcttcaccggcaaacgggtcgtgcgcaagcagtcggcacccgaagccgtgaaagatgcgggcggctgcaagcccaatgcgccccacgccgacgatccccacggtcttgccatgcagggtattcccgagcagaccttcaatattgaaattgccctcgcgcacgcggttgtaggcgcggtgcgtcttgcgatttaaggtttggatcagggcgacggcgaactccgccacggcttcgggcgaataggccgggacattcgccacgaagaggccgagctcttcggcggttgcgaggtggacgtggttgaatcccgcgcagcggagcaggatcgcccgaatcccgtaggcgtagagagatcgcagcacgcgctcgtcgagggtgtcgttgacgaagacgcacactgcgtcgcagccttgggctaggggcacggtctcttcggacagcgcgaaggcatggtattggatggtgcacaggtcggggaagtgctgctcgcgcacctggtcgagataggtgcggtcgtaagatttggcgctaaagacggcgagcttcatgatggcgtatgtgttgtgatcttgccccgcggggtttggatgttggactaccattgccaagtcatgacgccatatcgtatgacacctgcaagcggccgttttggtcagtcgtaggttgtatatctaggttcttccccagattttccgattgcaacccgcatttgcagatctatattctgtattcaactggagatcgggatcgggatttgatctgaatactacctacccacgtggtagtgttcctgtatgcatcagccatggggcggaatagtcatgcactactctgtacagagtagttagttactgaaagcagttcacaacttctctaattgaagtatgtaataacacctcggcaagctaccaatgtcccacttcccgaggtcttctggacgattacttttttcagacatgcaggcaattcctaatttccattgcgcacgagttgattggacccgtcggtctcacgacttccgcggctccggtagccgctggcgggcaaggccaataggaagatggaggcgataacagccaatcagcagtcgatgataagaagagacgccccgggcattctggttggctgtgtcgttagcccgacgctagcgaacctaaggaatcccgacgttttcccttttcctgttttcttcatttcctaattttcagttttggatagatgagggcagtgaagctacatggtacatgaatgttagatattgaatctgtttaaagatcattccaagactgtagggagaacagagcacgagtagagaccaacacagtcttacacacaatataattatgcgaaccttggaacctcaggtagatcggaaatgaacccatcggacttaagtggagagaccgcaaaaggaaacccgtcactggggcttcatccagcggtctgaattcgattaatcacaaatagcggtcaaaaggagggcggatgtgtaggttgtagtgaggatgctgatttcaaggaagaacaaagtacaacatacatagttcgtgacaagaaggaatagagtcccagtacgcggaaaagacacacgggctacgagtacttgccgctacctggcccctgcgcgtgagtagtacccgccccgaagtaccgcaaagtacctagtatagagtgctaagtaccttcatgtatgtcgtacctcaagtaacagtatcattgtcctcgtgtacttcatggaggagcatatcgcagaggaggatgcttctcactcgacttcacctcctccctcacctcctttcgccctatttattggcctctcgtctgccactgtcactgttcacccgttccctctccatcttctccactgaacccactctgtgcgtaagaaatacggagtagcctcggccacttacagtcaaccttttcttcttgcctccccggctgaacggctctgtctattgtccttcgattaatcccaactcctttttgcccctcggtatctgcacttttcgccgctgcgctggagattaccctttaactctactttaaacattccgcctcccacctttcaattcgtcacctaacattcatcctcttcccatatctcaacttcaacttctacctcaactcaactcaactcaacctccacttacatcctttcattatggcgactcgtgttatgaccaccagcccggctaccaaccaaatctcggtctatggtcagccctcgccaaccaactccgtcaccaacactccctccaacaattctcccacctcccctcgcatgtccactgcgtctctgcaccaactgcctctgcagtcgcgccagctgcgtcctctcaagggtcccctctatgtccctgcagctctgcgacctaccgagcgaccccagaaatcgtctcctatcaccccacctcgcagcgtgcatggctctctcgacagtttaaacgaggactcagagccgatcactcgccgttccaccatggagagccagtccagcgaaattagcgagagcgcccagcacgaatggatgaagaatgagcacctgggtgaggtgaccggtcttccgacccgtacacactggaaagtgagtatctgagaaaaatatttccatctttccttccttgggcgtctttatagggattgggttcggtgtggattgcgcagttcttgagcaaatgtcgtgtgcgatcgtcattcctcggaaatggcgtgcttagtccaccgcctcatcccttgtcgcattccacatatatcctttgatcgcattggtcattggtcactttcttacaggtcaacttactaactttatccaggctgactctgcctcttccaactgtgattctcctacttgccgctcttcctttggcatcttcctgcgtcgccaccactgtcgtcactgcggtcacgtcttctgtgcttcccacacacctcacctcgttcctcttgaccaggatgcccgcttccaccccgatggtgtcccatcgcgcgcctgcgacctgtgctggagcgcccaccagcgctgggaagagaaccgctccgaccgtctgaacaagatccagcacaccatggatgctcagcagactggcatctccgtccccgattctatggacatgaatcgcgagcccaacgtggccgacgccgccgcctccgttcctcgtgactggaactggagcactttctaagcgcattgcctgtctcctttggtcttcggtcactgtgactagacctgcaactcggcgtttcacttgatctttttatcatcttttcactttatcgagtcgtgctcagcgtgacctgtttttcttattggcgaccatggctcggcgtttctcacaagccctggaccctgggctttgtttctgttttctgcagtcattttatgactatgcatcatgcctagaggttctcatcggtccttagcgacccgtttatgtttctgctttctttttttccgccttgcgttgatcagacactcatcggtctctagcggtccgattgatctttacttctgattctgttttttgcttcgcgttgatctggataccccgtcggttttttattgcggcgcgatctcatttgatgtttcttctttcctagaccctgatccgatgcctgagggaatgcgcttgcaatttcccagttgatatctagttcgatttagttcgatctagttgaatccaatccaatccattgatattgatattgaaccttgacctctctcaactcgtagacaatgtctaccctctatactttatcatcctgtagatctatttatccaaaaccaaccgccggaacatcccaacatgctcaatcccctcctccacccaccttcccatcgactcatccgtcacaaacccaagcccagcgtacatcccctcgacatcaacctgcgcatgcacaagcaccaatccccgccacggacccagatcggcacccgccccccttctccccctcgcaatccccgccacagcctcatcaatctcccccgcatgcccagccgcccaccccaacgcaacctccaccaaccgccgcccaagtcctagaccccgaaaccccggcacaaccgccacccgcgtcagcttaacacagggctcgtgcgtccaatcgtattcccctcccgctgaagattcaggatccgtggtctgcgcgtgcgatacctgcggcgggggcactagtcggattgttcccactggcgtgctggtcgagtcgttgtataggacccagtgccagctgcggggatcgtcactgtcaatttctgtggatgcggtgcagtgttgctcgtctatgaagacggttttgcggatttttattgcgtcgttgaacacttttgggtttgtggtgccggtgccggtgtcgaggactagtttggcgtttgggcctgagggtggttgtattgatgtactgaattttgggatttgtgccattgtgttggtatggatattgggtcttgactcttcaatggtaagtaatgatggtggagatttggggggtggaggagttagttaggtcgtagtagagggccgatcctgatatagatctaggcgagatcagccgacattgaacgctacctacgcttgattggaatataattgaatatgaagatactatactcttatcgtagtgaaactatcacatcttaagccaatataataagccatgacagccgtgtagttatctagtcccaagggctgtatacatccaatgcaaacagaacaaacaacatcaaatatcaaaccgatcgcaaaaatcctcaattccccgaccaacattccacaatccaaatgtccctctacttcgatgcagtcgcaatcctgaccgcgccctcctcaggcggctccttcaagtcgcgagtctacagcgcccgcaacctacgcgcctctccagcccagatctacgcactgatcaccgaggccgcaaaatgggacactgtgctagcagatgtgatcgataaatccggtattctcgcactagagcgcaaggtgagctgaccccaagaaaaccaccagatatacctacctactgactgaccaagtgatttccctctagctcactcccctcctcgctctcctcctcgtccatgaccacctcctcgcgaagaaaggcattgccgcgccggcaacgcacacactccgccagacggtggagcgccacaaggccaggttgaaggccgagttcacgaaagcgcgcgtgcgtcgtggatgcgcttccgtcgagcaattcaaggctgttgtcgtgcgcgagaaacggctcgctgatgggacgagccatttcgtctacccgcgctgggtgcgcgttaataatattcgcacgacgcttgaagagcagctggatactacgttcaaggcttaccgtcgtgtagagagtcttgcggaattggcgccggaagacgagatggaaagtaggaagccggagccgaggttgtttgttgatcctaatattccggacttggtggctgtgccgttcggtgcggattttactgcttcgtcggcttacaagaatggggagattattcttcaggacaaggcttcttgcttcccggcgtatttattgttaggtgaccgcgggcctggggacccgtgggagggtgacttggttgatggatgtgctgcgccggggaacaagactacgcatttggcgtcgcttctggcgaagcagcaaaaggggaataagaacagcagacagataatcttttctatggatgcatctatcacccgttctaggacgctgcagaaaatggttggcttggctggggctgactcggtcactgtgctgcagggtcaggatttcctcgccctggacccagaagatgaacagtttgagaaagttactgggttgctgttggatcccagttgttctggtagcggcatcatcgggcgtgacgaggtccctcagttcacactccctgctgcagcaccatacaaggcgcccaagtcacatggaaagaaaaggaagcgtgcggacaacgaggaagaagcagatggccagtcgaaagttaccattggaacgccgcaggtagcgcccaccgatgaaaatgatatcccagatggcacggtcgacccagagcgactaaccaaactatcaagcatccaagcgcggatcgtcgaacacgctttgcgtttcccgaatgctacccatgtgacgtacagtacttgttctattcacctgattgagaacgagggcgttgtggctcgcattctgaattcccaggttgccaaagagcgcggctggcgtctcctgcgacgtgatgagcagcccgagggcttgcgtcggtggaagaaacgaggcgtgcgagaggagcggccggcggagggagagacggggccatcgggctcggtagatctctccgacgaggcactcgaagcgtgcatccgatcctggcaaggcgacgcagaaggtcttggaggatttttcgtcgctggattcattcgggaccctgctcatgtcacggccgttccagcgaaggaaagtagacatgatgagagtgaaggtgaaaaagatgaaaaggacgaagacgacgaagaatggggaggattctccgattagacaaaagtaaataaatgcaagtttgcccagcctgaaacattcccaaggcatcttttaccatacatccaagtcctcggcgtattatgcagtttaagacttgaacagatgtacagacgactaaaggaatttccgtgaccggtttcggacctgcgagctggtatagatgtccaacttgacagcaaccaagacaacctcgtatatcccggtaggcccggtctgcacttgcaagcgccattgtccagtccgaacaacccagggcttatcgtccgtattatcgacccgtggacgtttggctggaggcacactatcagcgccagcgccagcttcagccttagctctcgatatcatcaaatgatgagggtcttgttctccatccacggtgagatcagtttcactgtcgacacggaccttgagtggaacttggcccaatggcggatgtgaatcgggcaggtttaatttcttgccaaccgtctgtagcaaactgacaattctttgtttcgaaaggcctaggaagtcaacacgcatggtcccacgatgaatcagactagactcgtcgccgatctcaaccaccagatcggcggcgttgtcgtctataaacggacgcgcgtatgtgaccattcgacccgacccagaaaccgtattcaagatacactgaaccccagacggccgtacatcctcgagccggatgacgatttccaaacgatggctgaagggattcgtcgttatctgatgcggtatcaacttttgttctaggccgcgcagatggaaataacgacagtcgcgcaggagcgcagcccgatgatcttcgtttctaatatgtagcggatacccgcgcagcagatgcaggagctcgtcgaagacatccgcggatcgattcggcacgcttgggggaacaatggccgggggtcgcaatagaccctgacggtccaggcccgggaacacttcagacggggaagcgaagaaggcggcgaatccgagggtgaagaaattcggggtatcgcctggacctgaaaatatatcgcgggggatctggaagtgtcggtcaccgatttgaataaagcattcggactcgaacagctgggacatcaatcggggcactgttggtcagcatacttctagggtacgggtacctggacagaaaatgctcacatgtgtagaattgcgcatctgcgaatagcttcacgaactgcgcgccatcttgcggccggacatggtagcctggatgcacccatcagcctctgtcacgttgtgtttgtccatggaccctaccctgcagatgtctagcgatctcgtggaatgtcgtgggatcgcgatcgatataaagggtcctggtgttggctacatctggattctgaagcaattgaagctcgaagaagcgtgaaaagtaggatggagctgttggaagggtcagtgtgagttaagacagttagacgggagaacaagcgcgtttaccatcagaggcaattgaagcacccgacagacgaaaggtctcggaaccaatttggatagagaatactttctctctcggcagactacatttagagcgagtgggagtgggcttgtccatcttttgatgcgaaggtcgaggtcggagcggagaaattacattttgcctgacgactaccggctacctacgacataggtacactacacacacactacgcatacacttcacacatactacacactacaattataccactgagccaacttgaagttacctgaaattgaaactagtttaattggacctgaattttctatccacgctggctccagtctcagctcaccttgagtctcacatggcgctgaaactcggcaattctccccacagacgtgccagtcagcccctggcttccgagaaagaggggcggatctgcctctccaggaaacttaggccgtgaaacggtcaggtaaaatggagacttgcacggtcttgactggtcgagatactcaattactccaccgccacaagagtcaaaagcttcactacggagtccttctccactcgaccgaggctgctatctttgggtcgcgaggctggctgaccgtcgcctaaagttactggaagagcagtccatacagagtactttgtctatgactatccacgctaaagatgaaccaggttggactctgcatacgtacctgttgtcatagtgggaccttgtcgagctagtactaggtattataaacatctgtaccgtgctcaggtgcttctgtctccttgctcccaaatctctttcttattctcatcctaccattcatcctatactactggggcttgatctacgacagctttgtctgctctagtccttgcaacatgccaaccctcgctgtttccacatacaccccgagggatgtccctcttccgccagcgccgtcggccacttacttctcggagttgcagtggaaaaccttctatgcgctggccgacgcagttgtgccctctatccacactgcagcaactaccaagtcatcgaacgaccgggtgatttcaaatgcagagtggaattccgccgtgtcgagcttgtcaacggctatctctggacctgacgccgtaaaccttgccacccagtacctgcaagaaaatgtctcttcgaacccgcaattccgggccgcagtggagcgactcctgggcgactatgtgaatgacgagggaagaaatgggtttggtttcatcatgtcagcgctcaacacccgtgctggttctctggtcatgacgggctccaccactccgatccaggaccaaccgattgaattccgagaaaagatcttgcgcggatgggacacctctcgattggctcctctccgcgccatctaccgaggactcacggccattgttaagaagtgttgggttatcagcagtccaaccataagcccggttctggggttcccaagcatccctattcatggcgagcaggtcgacggtttccagtttgagtttttgcagttcccttctggggatcagccagaaacgattgaaaccgacgtcgttatcgtgggaagtggctgcggcggtagcgtggctgcaaagaacctcgccgaagcgggctatcgagtgctggtggtggaaaagtcctattcatacccgaccaacacgttccccatgggcgcgaatgagggatataccaacatgttcgagaacgggggcgctgtctccagtgacgatggctcgatggcggtcctagcgggctcaacgtggggtggtggtggtaccgtgaattggtcggccgctttacagacccaggggtatgtccgacagcaatgggcggatactggtctccctttcttcacctccctcgacttccagaaaagcttggaccgcgtctgtgatcgcatgggtgttaacgacgatcatgttgagcataactaccagaataaggtggttattgaaggcgcaaggaaactgggatatgccgtgaaaacagttccccagaatacaggtcacggcgaacactactgtgggtattgcacgttaggatgcgcgtcgggtgggaagaaaggcccaacggagtcgttccttgtggatgctgctcaggccggcgcaaaattcatcgaaggattccgtgccgacaaagtgctattcaccaccgtcaaaggcaaaaaggttgcttctggcgtacaaggaacttggaagtcacgggattcatacttgggcctcgctggtattggggctgtggaacgtcggctgattatcaaggctaagaaagtagttgtatcagctggcacattgcaaagtcctcttctgctgttgcgtagtggtttgaagaatcctcagattggccgaaaccttcatcttcaccctggtaagaactttctttcacagcacattttacaggcacttattttcttctacagtgcttgcggctagtgctgtctttgatgaggatactcacccctgggaaggctctgcgttgacaacggttgtcaccgagtttgaggaccttgatggaaatggacatggtgcgaagattgagactgccgcaatgttgccttccgtggtcattcctatcttcccctggcgagactcattggagtataagatgtgggcggccaagatgcgtcacagcacgagcttcatcgtcttaaccaaagaacgcgatactggtcgtgtctacccagatccggtcgatggacgctgccggattgattacacggtatctgcctttgaccggaaacacatggtggagaccctgattggcatcgccaagattgcgtatatctcaggagccaaagagttccatactgtttaccgcgaccttccccccttcatccggccagagacttcagaccccgaggcccctgaaggcattaacaatacggctctgcagagttggattgccgagcttcgtgcgaagtcccctttgaacccggagcgtggtttgtttgccagtgcacaccagatgggtacctgccgcatgagcaagtcacctaaattaggtgtggtggacccgaattgtcaagtctggggcactgacgggttgtatgtcgtggatgcgtccgtgttccctagcgccagcggtgtgaatccgatggtcactaatatgggtatcgccgattgggccagccgaaacctcgcgcgggcgatgggaacggtaccaggcgagggcaacgtgatggctcgtctgtgatgtcatggtagattgaccgctactagttctagattatatgatatgcctagcatgattttgtattaaaatctatctcttcctcaggtttagttagtttcgttataagactcgttataagattgaggtgcttgatgaagccgaatatcatgtctaattctttccctgatcgggcgctaatgctatttctcatttatcatgttgaatctaagccttgggatcctgacgcttctcaataaattgcttctcaccaaaggcctccttgacgccctcggtctcgagagtgcgctcataccaagcgaccacggaggggtactttgcgcgcatttcagcatcgatagccatggagaaaccccagaccagggcagcggcaacggtgatatcagccaagctgagcttttccttgctcgcgaaccaagtgcggcccttgaggtgagtctcgagacattccaacgagcgttccagacgcgcgaggttggtctcctcgactttctcatcgaagggccggataccgagacgcggcagcgccaactgcgtcacagggtccaaaatctcaccctgcgcaaagcagatccactggcggatagtagcgcgctcggcggaggtagcgccagtaagctgagcggcagcggggccgctctcggcaatgtattgggtgatggcgtctgactcgaatagggttgttccgtcggcaccctcgaaggcgggcactttacccaaagggaacttggacaggaaatccggggtccggttggtcttgcccatggcgaattccggaaccgccacttctaggccgttcagcttggccgcggccagggcctagcaggggttgttagcgcgtgattgcatgctgacagggggtcgagattggtaccttcatgacccggggactgggctgataagagtagatagtgccgaatggtgccatttcgatcgtgatgaggtgagatacaggtacattgtagaattgaggggtatgttttatatgaagctaaagagcggggcggaatcaggtggaaccggatttctaagctggtgagctgatttgaagcacaaaacaggaattgcgcggtttgacatatatctttgtcgttttatataaactcaggagatccatgtgaaattactagcaactggttatcaattcagtatgaaggagcttaactcgcgccaaatccgactcaagtggcccaccttcgtgagcacagtcagaacttaatgtcgacaagtctccctcggctgttacggcgagggtcacctgcacaactggcccgtatggctcgacgtactcgctgagtaagcgccaggggtattcacacaccgcggacatgggattagaaccttagcgattagtctactcaattgcatgagccatcttgggaacctccactctagttcgaaacctccatttcaggatacgctagtagctagtcctaacatcagctttttgtctcttcggaccgaaacagttaaatatacaagaaattagggtcaaaatcaaaatacaaggaatcgcagcacatcccagatctactaggtcacgccttgcatgcctcaccgaggcgcatatagttccaacaaactgcaagttgggtcagcttttcacttcacaatttcggggtaataaagacgcactcgtatgtcccatgtccttgccaaacaagctcttcatcagatcttcgccatcgcgtgtgccctcgctcgggatataactgacggccgttttgccgagagcgaggcccattacagacgggaacggctccaaggtctgatactctggctttccaccggtgcactctgccagcatatgctggtggatattcatcgccgcgtaatggcccatatgcattgcaccaccacagcgcttaatgccttcccactcagtgaggtctcctactgcccaatgatgctctgcgttagggacggcaccggagaattgtagtctgcagaggtattagaaatgtttgtgcgcaacttggtggaggaatagtcttacgagcggtgcactttgatgtatccctcctcattcaacacctctttcggcagatatgtcgatgttggaacgcttcgggagacggcgtttagaacatggcccgttctgagcttttggccatcgctgagtgtgagatcccaggtccgtgtcccatttttaccgtccacagcggtcgtttcgataacgcgttgtcctaggataacctcgacgcctgtatcgcgcaatatagtacctacgcgctcggcaaattcatcgggcaacggctccgaagataacaagcgctttcgagagtggatcagagtgatcttctggtctgggttaaggattttcaattcggcagccatctccacgcccacggcgcctatccagaaagacatgttagcgggtggaagtatcaaagagggagggagcacacgtacctccaccaacaataaccacaccctcacgggcttccttcacatccgtcatatgttgtctagcctctttgaggaactcatctcgccacagggactggggaacagtggggaaagaccgacgcagcccggagcctgcaatcaagtagtcatagggctccgtgcggttactgttggtctccgcatcgacaatattggcaactttagcattgaaatccaccgagctgacgcttccctggatgaatttgagttctgggcacttgagcccgggaatatcttggaaacgagtccatgcctcgggcgcgaacttttcacaggctagggcctttggggatccgatcaggtgaactacatatgtgagcgggggtgtaattgcgggggaattgtcgatccttggggagcttacagtagccatctcgcttatcgactacagttatctgtatcggaatacgatgtgtaggagctttggcatcgggattacagttgaaacgcgggagacgaccttgcgagagatcaatgagggttaatgcagcagatagaccgccataagagccaccgatcacaagcactcggaagttgcgtgatacagttcggacaaagtcattggatggcatggtgagctgagaaggagaggtgtgacgagcaataaccgaagaaagaggccgagaggaaagcggaaaaggagaaggaaagtaaaggagagaaaccgagaaaaaaagccaaggaactgagctatgtactcgaacaaaaataaagaaaatagttatatcgtcatatcgtcggattatgcgagtccggatcttatcagattgaaagcgacatcggatacagcgcatccatggttgttccttggctttctcttggctcggattatcagatccgagggcagccgtggaaggtgaaacatccctcggttgtattgaattcctccgacagcacagaccctagtaagccaagttttttttggcaggaccgacatggtggctgatacacgcaaaagcatatattaagtttccttccgtcaattgatcttcgtgtgtaatattaggatagaagagagctctatcacggcataattacatgcacaacgttgaatattgtatgaaccagaagtttgtttacggttggacccggtggctgtaatgcttgtaaagtaaaatacacttagttccgtggttcgatacagccacgcaacccaaaagagcagtgatcgtcgatcagacaagatgagcatctaatctgattctggaagtgctcgacccgacgtaacaaacgaagaaaatgcgtaacaaaatagcgcatttgctgcaagatccgcttttcgtcattctttatgtacttggcgttacaagcgttgagctcgggcgaatcacaatagaatctgataacatacgcccctcatttaattacattttttgtttcaaacagattttcggagttgcaattttattgtgcacgaggttcgtttgtcaatgggatcggggtattactgcaaaaaatctagtctctatactgggtgaacacgagggctgtacaatctgtgctccttcctttttttttttaattcgtcttctgacgctgggccagcaccgccatcgccatatcccgtagctccaccttgcgaactttgccgctccccgtcacaggaaccgtgctggaagccccctcttctccaaatacaaacacatgctgcggggctttgtgtcgacccaaagtttcacgtgtccatgcgcgcagttcgtcatcggtcggacgaccggcgcccgaagcgattgcgataaatgctccgacgacttcgccatatttgggatcagcaatgccaaccacagaggccaattcaattgagggatgcgcggccaatcgttcttcgatctcgaggggatatatgttttcgccgcctattcgataattagaaatcgcgatcaatgtctacggtggggtgcaagcttaccgcgaatgatgatgtccttgaagcgaccagtaattgtgcagtacccttcggcattgaaggaagcttcgtcgccagtcttgagccatttgacaccctccgcatcggttataaatgtctctgccgtcttctccgggttgtgccagtatcctttggtaagctggtagccggccatgcaaagctcaccacgctgaccaacgggaacgatgtttccctgggcatcgataatcttggcgcgagcgtggggcaaaacctttccgacggtggttaatcttgtgtggatgctgtcggtggtgaaagcattgaagcaggtaggcgaggcctcggtgagacctagacttggttagcacttgatcatcaagccaatgagagggatggtaccatagctactagtgtattcagtcatattcaattccgcgaagagccgcttcatgagtggccgcgggactggggccccagcaatgatgcctgtgcggaggtttgagctgtcaaagttggggggcttgggaacggcaaggatcgcctcaaacatggtggggacaccatgcagagcagtgcatttctcgtcggagatggcatgcagaaccgccttagggtcgaaggtttcgctggggaagacaattttggcgccatgggtgaccaccgcgagcatgcccaggaccagcccgaagcagtggaacaagggcggggggcagcacagaacatcaaaagaggtgaagtccatgcgatcaccgatgaaacgcgagttattaaccaagttactgcgcggggattagctatatttaacaacgaatcgtcgtacgtggtccacatactgatgagttaacatggcagctttaggactgcccgtcgaaccgcttgtgaattgcagattgcagacatcgtccggccgcaattcggcctcgcggtcctgaagcacatgtgcagcctgcgacagaccacgttccatgacatcgtgataggtggtgaaattgttgtaactttcgcggagaataacgatttcctccaatgattccgaggtcgcagactttttaggattagggcccagtttgagaaggacttcctcgagattatgacggccaatgcgtggtgtcatgaaaagcattcggcattctgaataaaagcagaacaaacagccgagattagtatggagtcaataatacggaagtggatatcacccaccactgtgattcaaagcgtaatacagctcggagggggtgtatgtgttgttcaaaacgaccaagatagccccaactcgtgcggccgcaaagaacaccgagatgtactgctcacaattgcccgccataattccgatgcggtcacctttttgaataccggaagccaacattccccgagcgagacgatcggtctcgtctttcagctggccgtacgtccatcgggcaccggtccaggggaagaccaagcactcaattcgcccatactgcagtgcttgcagcgtcagcagctcacccaaggtaatgtccagcagcgctggctccgtcgggcctgcgaccagagacagctgcggagtagtcggaggctgcacatgcgacagcgtctgctgcaagcgctgtacacttctcggggccgccatgataggtagattgaaaggtaaggaaaaaggaaatcaggaaaaaaaacctaggacatagcgggtttatagatgtagccgacaataccgcgacaaatttcgcacaagataaatttgattaattcgattaattccattccatcagatagcccgggctccacatcggagctgttgtattggtaatttcacgggtttggcttttatgcttggttgactcgacgccttggcgtctgacaagactccactcggtcttcaagcgaaccttggaaccttggcaggatacgcaagctccgagggtccttgtaggtcgatgtatacatcgaagatggtccctgcatataacgaaagtacttactgcgtatgtgtttgcattctatagggcatctgcaaggtactgggaatgtttcccatgtacataatccgatattgatcgatcgaaaaggctgcaaactctagcctacccttgtgaggagctagttcatgacatgaattttgctgcttacggtggactgacaccggaaatttgactgtctgcaaaatataagatatttgaatcttttcgtaagacatctacatcggtacaagtagaatcctctcctcggtcatctccccggggatcgtctggtaaatttcctgtcacggtagtatggcccaggcttggatgtcaggatctaaccggcattgaataacagaaaaaaaactccctcgtggcactggaccccactcaggatcagataaattgtctgcagaattccatcccgggttatcaatcagtgtgaagatgtccaagtggagcccgttgtcgacgagcccgggacacacgtgtgagttggtgggaatacataattggaggcactgactcttggcacatcctggcattctgaaactagttttcgcttttcgtctgttggaacttgtaagacaaggaacaggcagtgggtcacagcctagaccatctttgtcggatattgtaggcttagaagacccggtatataatatataattcaccagcttcatcaaaatctacctcgccatatataacaacacagctaccatttaccattgtacgagttatgcaactctggtctatacctagggcttgggaatctaatcaatcgggctgatctaatcaatcattcccgacatcggcgccttcgtgtgggacccacctaaaaataccataaataccgctcgaaagattcaatgaatgttacagagaattagtagggaattggcaggcaaaaatagtactccgtagtctatactaggtacgaagtactgtatgtactccgtaccaggtacatatatgcattgggtataaaaaagctaattattgcgtaatatgcacggagtatgtcaaggggctttgtcgtatgtcaagatccaatccactagggctgaatgccggcgtcctagttgggcttctatatttgttctagacttgatgttaatataattgatggagtgcttagaggccttcttaatttacattggactaaccctcactactagttacgtcatggttgctttattaattattgtaacttcatttctcgttgggctgtctgtctagctgttgagagtggactactctatcattgcttgtcaaccgaacaacaaagattccccatacgatcagattaaatcagattgatagaaagcaggtgcaaaaagcctatcattggcatactctgaatgcaaatagcaaacacaagacatggatacatctcaggtagacggcaaattagtacataggattctacacgccgaacttatggccctttggtacagaaagatcgggacaacctttccagtcgcaggtgttctgctaatagttagtataagtaattgaacgtcagagggggtaaacacaccttgtaaacctctgttccccaccatttgaaatggttgctggctccagtaaagaaaattgtcaagaaaatcaagacaccagcaattcccactgacgagtccatggcagaactcagcacaaagttatacttactccaccagctatgcagacgcttccgaatgagccagccaaaggtgagtccgacaactgcccagcttccgtaattcattccggtcgcagggggcaagtaattgagcccaccgaggaacaggggaatatgaacccttctccatagtgacttggggtatcggcgggtcatataatagacgggaatgggtagaatggcaccgacgatgaagaaataaagcaaagcggaatagccaatttggtttgagaagtaacgacgaggacccactgcaccccagatcaaggaagtattgaagtgggttctgctgtaaggacaagtgaaaccgttaacagcagcgctagtgcagacgccggtgatgtgattcagggcccaattgaggacaccgagcgaggagagcgtgccgataaccattcccacgcattgaaccaagaacagttttcgttgcgggatcttccgggtattagcatgattcaactatagtaggaaggaaagggcttgcatggcaatagtaagcgagtttcatatcctgggcaaagtaaagacccttgatggttgtgatgtatccgatgtcaaagaaccagatattggccaggactttgccctcaaagacgaaaccggccacgatacggcagaagatgtcgatattgatcttgaggttagaagtggcatagaccagggccaactaagattggtcagagaggtgtccaatgtgtaaatcggaacttcaggtagactcaccgcaggataaaatatcagtgccacagtacacgccagcagaacaccgtaccatctcagttcaacattccaccactcaacggcgaacatcgacatgaataaggctaagacgcatgcaaccaggtaccaccacaaaggcacatctgggtctccccgctcgtcctcgctgtactctctagagcgaccgggaaaagactccaggactagccgaggcacccttttggcagcatcggccatgacatgacgcttttcaaggacaacccaaacaagaagagcgctcagggtcgcaaatgagagcccaaacatgttcaacgcgtaggtcactggcatatagacctaaacgttccacaagttagcagaatgtcaagttttttgagtttatagaacgtgtaaacataccggggaataagcaaggtacttcttaacatcgagcttgtagcctgaggctgcattgacaatctttttgactttataaatattcccggtattgtcgaatactgtttgcacaagttagatttggtcgggagcttgaaaggatgggttgtaccttgagagctttggaaaggcaggtagcctgtgttccacacattggaatagtatagagcaacagccacaatccaaatccagaacaccagggaaacgaagacgttgaaaactgcccacgatgggatgagcaagggtgatccgacgtaagatatttggctccctattggggtcagcacggtaattgacctgaaaggttgtgatactcacaatcaaatgtaagcggcaacagccccattccagaattcattccgaagatctgattgactactttgctctcaggcttgatccaacacgggaagctgaaatagctaagcgccgggaagatgaagtctgggaaccaataccagcagaacgagatggaaaatgccataccgaagaaggcatagcgggacattttccaagtattgtaactaccatctatcagttccattcaccgagacaacaaataaatacagggaacttacgtcacttgcactttttgctggttgacatgatgcagcgttgtggtcaacgcagtaacacccagcaccccaggccagatcagctcttggggaacgaccacaatcgcccggaatagaccagcaagacagaacccgatgaggaatgtggagaaagtaatgagaatttggaatccccatcctgctttgtaaccgtagaacatttgctgctctgtcaggacatcggcgccaagacgaacgtagatactgaggttggacataataaagatcaagacatgttcctagaataacctttgttaaactgattactgtgacgttgccagggaacatacctttgtattaaaaggacccgggttgagctcaaatgccagtcgtcctagaggaacggtccagttcgggacgattttctcccaaagctttcccaggggataagccaacaagaggacaaccgagccggaaattgtcaaggaaggtgcacggagcgtgtagagtgtgttcaacccgctaacgatgacacaaaaggcaattcctatcacccacatacgtagagtgaggacgggctcagtaggatcatctttagctatacctataccagcagcccgcaagatttcggtctgtgaatctatgtctgcagtggtgtgagaatctcgcaaaaaaagaaggaaaaaaaccccaagccacagcaacaggcagcagcagacttaccggaatcggtattattttcatcctgaacttcttccttttcccgaatgtttctctccagcaggttaatatctgtgtccttgttggcttccatgatgggcatgaaggaaaatgagatagaaagaaggatcagataaaaggatcagataaatagacaacatcagataagatgcagaaagaacgtgtaatccggatgcaacctcggactcgatccgtagaaatacacgaagtccgtattcccacggttctcagccctatagggctggctctcaggggagacaagcttcattctctgtctggtccagcgtgttattggacaggttccagttcaagcggggctgtaatactaagccagagtatgttgttgcctagttaggaaatacccacactcaacgacacctggtttagctttagtcagtgtctagatcttacaggtcagatcattttggttattttccgattagggcatgattttctcgcctctaacagaaactttgggctttccttactttgtagactaccaacaagtagttagtttgtaggagtactgcatatagtagttaattgagccactagtatacaacatatttccaaactctcccagtgatggaccattatagaaccaccgagaaagaacaaaaagcttccactgtgggaaccttaagtgtccactcaaactctttacaagccttctcgtgtcattttacaggcatggttttatcggccgaggcacgttcccttggcccataaaaccaaggtttacggtctccacggtaagcatttggatcctttctcagtggacaagttcgggttaggagtgataggacccctcttgtggacaaagtcaaacaagacactaatacggagtactaaaatagcagcctccaggcgtggctcttctgggaaccgtacggatgtactcgtaaagaatggatgtatgacgctcaagccatagaggtgtcatagggccgccatatagactcgcataattcgataaatgcagcgatgcaaatcaacatcatcccggtatgtagaatataatgggccaactccacggcctatgtttctccagtcaccagtaaatcctcttctaccactgagacacgcactttgatgccccagccatctcgcccaccaatccaattcttccgctttccgaccttctggattttctgcacgtcattttcgagctcttctctcaggtgagacgggtcatcagccactttctggatggcaattgtcaagtccaggccttctttcttgcccttcttccccatgcccttcttccatcgggccgagggaacaatgcgaggcttagaggtgtcgacacgcccggttgggtacagctgggctaggacgaggccgagttttccaaggtaacgtgtccaccaaacttcctccggtgtcaagattccttgtagctgggtcttcaaatccatgtctctgggtggcagttctccgccataacgttcctggagcatcagtgccaggagggcacggtggtcatgtggaataccatgcgtggaggctaggatcccagtgctagtgctgtacagtgcggcacttgaggaaagttctttggccattgtggcatgataatagagggaattagcaaaggcctggataaggtgaagactgatggaaggcgggaatgatcggctggcagatggtcgaggaagggccgccaacaataaagcggccagtgcctgggccgacgaaggcgcgtgacgggccgtggcgacctccaaggggtcctgccgacggacaaccgggagcatctcacggaataacactccttcccgaactccaccttggcaaaaatgggcctctttgattccatacggtaatgactgcgccagggtattgactaagaatgccaccgaggggacttgcctgcgtcgccggtccgagacccggaagatttcatgtgctgtccgagccacctctttgagagctttggtgttctcaaagtctttcttgggtgcggaatacccattaataatcgagatggggtaactttggccttttgtctggtgcaggtataacagaagatagccccatccccgaaatcctcccccggacaggtagagaggaaagcccccttgctttcgggccttgtgaacaagctgctcagggacgtcgagggtatcaaaagcggcgcggaagttgtttgccatttcctcgcggaactcctctcgagctttgtgcgcatcctctttactttttccgcgtgcgaggtcggccagtttctgggtcaatgcagctgctccatagggaaagctgactgatccttgggagctcatatgcacgttgcccgcatgcgatatgatccaagtcatctgcatgctgccaccccccaaatcaagtgcgagtccctccacgtctgagaagctgctggcaattccccatgctccgattactccctcctgctcctttcgtaatgcttccaccgcaatcccggttttgtggaggatggcgtccatgaactcagaagcattgaaagcagttcgagttgcttccgtggcgataatccgaatgttctgagcaggaactccaatctccacgcaaacaatctggaaacggactattgcactaacgattcggtcgatgacattttgtggaatggggattcgattgcctgaatcgggatccagttgggcctcgtagagcgaaacattgacccgatgaaaatgtacagtagggatgacacgggtcgtaggaggggagagatctgagatggaacaacggatgccattactgtagtatttgaagtcagtgaacagtcctcacacgcacattcaaagggaacgaagaggggatttgatctgcctacctgcccaaatctaccaccgcatgaaggtacgcattctgccctggatccgcgggcggcttttggccattcaatactggaatttggcttcctcctcccatttaggcaattggttgaagttgctcaggtgtactttgtgcgttgaatctcgaaattcagctgcagaggacctctggggaaaaactgcgtgacatcatcattttcgaccgcccgctgttctgccggacaattgtagatgtgctgtagctcccaagtacattttgtttgtttaaaaagaatcttaatgttaaatatttgtaagacataaagaattccaactcttaacgagtctgtggtcatttaagttcattgtggtcggatacattgagtacatcgtagatacgcgttattctcggcaactggcaaggcatcaacccttgccttaggcttaggtaaggttatagatcacatgactagatttcacatatttgtcaataaaagcttccattaactgactggaatcttgcatggaaccttgtctgtaaatacctgagtaggtagttcaactacaaaagctttagcggagaaaattccgctggtgttgcaaattctgactctgtatgtatgtagccctagaggtacccatgtacccctcatatatatcacaagcattaatcataagatctattccgtacaaatccatacaatgaccacaagccgcaagtagagtaaatatgtattcaagtaaccgaaagcaaatcagataccaatagagtagtaaatatctacctggctcgttcacttcaatttcgaccctgaaatgggctgatccaatcatgatgtcacgtggcgttgtctaatcaatcagatcagataaggcgtctgttttaactagggggattccgagtccacaactcaaccccattccttttttttcctttcgagttctcttgagaaactccgtgtcagaatccgagccaattcttattcagacctcttccgaagtttggtcctacctacgagatccaacggtccaacgactcagagacttcgccgatccacatgggtccacctgattagtgcgattatcggcttactgccggtgctccgcctttcgtcttgagccgttccttcactcaccctcagaccggccgactatctgaggactcattatgttgctctgttggctggtaatcgcactcgcccaaggtggctgggctaatccagaggatgagcggtgtgtgacggcggtctacacggcatacaactacatatcatttgctggcattctctcacaaggcaagcacagctgggaatcgcaatgccggaatccgctcaaggtcgcatcgatatacgccgcatccgatatatattgcaatgagcaggaacggacgataggcatggcgcagctggctaaccagtgccaagaatatgggaacctagagctgctgtcgagggaagcggtcgccgaaaacctgacagacgatgctataaggaatatgagaattgtcgactatcaagagctgtcccgaggcgaaccagtgaatgcgcctgtccttctttctgcgtcttacttcaacctaatgttcaaaacgattgtgagaccttctggaccttgaatatgctagtcctaaagcttattgatgtcctaggaatcttgggaacttgtgacttggtcacatcatgcatttgggtaagtctgctcaagctggcaagcaagacatatattgattaatcagttatattggctacgcctattggggtggtatactatctttggggatggcctatcgcttgagtgattggctattccatcgccgacaacgccgtgtagagcgtgtactcgaatccaatgtatatcccctcatgaggtccttggacgatatgccgttggtgggcaccggtcttcactggatccagactcatctgatgatcccaccgcctttggcagcatcacatggtcgatacctgctaggcttcacattctccaccagagtcgaggcgcttatagtcgtgggattctggacgctcagcatcgtattgagtgtcgtgggctatcacacctttcccggaaatatttagtaggtaccagcctgtggaagcgagatgtgcaatgttgacaggtagtctagctggcccgatgtcacaagccaggttcttcgttattctgcagaccgcactgggatcatgtcatttgcgaatttgccccttctatggctctttgccggacgaaataatatttttctttgggccaccgggtggagctttgcatcgttcaatatattccatcgccatgtggcccgggtggctactatacaggcagtagtgcactctgtcctttacattgtcatgttccatcaaagtaagtattgctcgtttggctttcaatgcgcgctaggatacttacagtcattccgacagcgggcaaagctgcgaggggtatgtcgaagacctatgttttgtggggtattttggtaggccccccaatttaattgatcccaagttggtcgatctctaattcatgttgtattagggcacattcgtgatgattctgctgttgatcacctcattggatcggatccgaattgcgacatatgagctcttcttgattgctcatgtcgtactttcgattctcacccttgtcgcgtgcttttagtaagtacatccccgcgatgaaatttctgcatctatttctaacaattggcagccataccattatatttgaaggaaacgaatactggaagtacctgtggcccacggtagctttatgggtcgttgatcgattccttcgaattgtgaggttgtgttactgtaaccttcacgtgagtctctcaaacagacttgtgaaagtttctgagagccatatggtttacgacgaaacggccgacgtggtgcgattggaggtcatactaggaacgccttcactgcagccttcaccagggcagtactacttcctataccagccatttaggcttaccggctgggagagccatccttttaccgttggagcatggtcttacgaaataggggaccagacatcattggcgccaaaaaacgagggaaaatcaactagatcgcttgatgtttcgcatgtgccgcttcttgcaggcggtccctccgatcaagattatccagaaagctcagaaaacatgtcgaagcaggagaaattgtcgaagttgaacttgactttctgggtccgcccgtatgacggttggaccagacacttgcgccagcaatgtctgagctcaccagccaagactagcaaaacgaccattcttcttgaaggcccatacggagaaacctttcccctgtggaggtatgaatcagtcttgattatcgtcggtgggacaggaatagcgtcggctgtgccttatattcaagatcatctccgccggtctgttgaagactgggacgaaagccccgaaatggagaagacacgagtgcgagacatggagcttgtttggaccaccaaacaagcggcgttcataagagatgtctctcgccgggaactgaaacctgccctcaaacgagaggacttcagcgcctctttttatgctacgcgtgattccaccgcatcctctgaagatcctaccgattttggattcgatatccagtcaggtcgaccccaccttcaatccctgatcatgagcagggcctgcgatgcatcctcggctggaagtagccttgcgatcctcgtatgtggcccacccagaatggcggatgaagcgcgcgccgcgacacatcttgcgatgcgacagggccaccgctcgatcaaatttgtggaggagtcttttacgtggtagcaaaggggctacatgagaacttttgtgatgagtatacgacaccatgcatatatactgatgaactgtgtagaggttttcgaggctagaacttgaccttttctttgttagatagacatagatagaatatcttgcccgtacgttgtatgtggcgagttccgggcttcacggttttcgcgttttccgcagtgggaattttcagactagaaagggtcactgaattcgacatacggagtactccgtaccgacgtgggaatggagatggggttgttgtggctgacagcggggcgtgatgcacgacgcaggagcctcctacgccacgcatacgactatcgatttcaagtcgagaatcaccaattctaaattgacctgttcaactgttaagcacagaaacatgagaaatggggcatcaatgcgataattcacgaaagaagagagaagatcgatgtggtgagaagtgatagatcggatttatcaactatccactacggaggaaccgagacgtcacacgcaacagaacaaatagcgctaccccatggccgaagatcacaacgagtaaccctgaattttgggttctcgtgactttcatatgcacctatgcatctcttcccgtcggagaaacataccggcagggtccgtcgatcgacaggggaaaacttgaacacggttatggatcgcttgaaagtcaataactcatgttggccaagcctttttccgctcaataattcacgggggcatccactccgctgcagcttcgatgctcggagaccatcgggtctttcttcccccatcagcttgaatgagaagatgagagaacggatgaagaactaggaaagttataaaaggaaagacctttccagtgatagttctttttatccatcattcaactctctcatcgtcaaaacctttcaagccctccaaatctacctaccttcttcaatcactttccacattctccaaaaaccgtcaaaatgaagttcttcgtccctgccttcctttttgctgctaccgccatggccctgcctggctcgggccatactgcttcccattccgacaacgaggtcgagaacgcagtgaatcagtgtggtaacggtgcccagatgtcttgctgcaacaccttccaccagaacaagaatatcacccagcataacgttggtgtcctctccaatgtcctcggtgccgttggcggcgagggtctcggcctaggccagggctgctctcagtttaacatccccgtctctggtaagtgatatatctatgccagtgaactaaagcatgagactgaccctattgtagtccttggtgccgctggcctgaccgacttcctcaagaagaactgccagcagaacgttgcctgctgccagaactccagctcccaggctgtatgtactcccccaagacgaagaagcggaacagagtcactaatcccaatagaacaacaacctcatcggtatcgccgccccttgtgtcagcttcggcagccttctgtaaattgcattccatcgagtgcatgcagccttttccgccctggacatatcaacgagaaccatcaaacttgttaattgtgacggtctctgcgggaagggctagtggatactagtacggagtatatatgtacacttgcaacgcctatcaggggcctgttttatccgatcttgtcaggccagctttctcaaatttgtgggaccgctgttcgtgagcgtggatcctgccattcatttctctttcgtttgtcaccagtctcggggcttttaattatatatatttattttttattgagaatagaatgtttttaatttgatatatttcgggtatagtgtcttccttctgaatggatcttgaaggggggactcgatttcgaaagcgcaacacatttcatgacagctattctactgtatctctagccggatagcatcatattgcacataaatagtggcaggtagaacggcagtctctatatccgttgcattgaaaggtaaatgcaatcgcagcacattgtcaccgacatgtaaccaatccgccgggaactccaatttcgatccgacctggtagcagctgacagcagaccgcacaatacagctgcttgattgattgaacccaacgacaagagtcagaggatctgcctgattgttgatatagctttccagtgacagattgttgtatgactcgaggggattccacacatccgtgttaccggctgcggtctttgcggccgctaattgcaaagttaatgtggctgttttgcgcttgttcaattgcttcgagtcaagcttgaaatgtatgttccagtcgtacgtcgtgtcatactcgacgtgggaatcctttgccgttggcccgaagaccgaccaatgggcagagttgagatcagtcgcagggtcgctagttccaatggtgtaattaacaccatcagggaaatcagagcgccagtcataggctccccaatatataagatactcggggggatgaagcggatgggttggatctctcgcatttccacgtcggaactcccctgacgacttgtcgggaatcccaattcgccagagctcagttcctgccgactcttgggtccaagtatcatgcagtgcagtctgccttcctgcatgaatgatgattccgtcgcgtacaaagtcgccgaaaatgccctctgcgtaaatagtgagtcggtatttcccttctttaacacgatcaatgatgaagcttccatcttgattcatatcagtccagtactgataggagcttggaacggcgctattatcttggaagtattggccgtcgacagtgagaatggcaattgggcgaacggctcccttgggaagcttcacggttcctctgacactgcctcgctggctagagggagcatacccgatgacatgctttgcaatagaatcatagaactcagcgttccaatgaggatctgctaattcttctgcctcggatctcagttcctcgagagatgccgagcccttgccgccattgaaaaggtaaaattggggaccgaaagttcgatcgaatccgtttgtgatgtttggcgtgccctctccatgatgatttgatacgatatagttgtacactataccgtccactgttaagtcggaatggagtggtccctaatagatgtcagccgctgcattccaccgtgctcgatatcgcttaccccataatatgtatcctagaataaatttgttagatgggattcgacctggtgagtattggagtaatatgaccaaccttggtattcatggctagccaagctccatatgttaacccatttgaggtgctgccgtcagcatagagaccatgaacagtattgtttctccattctaagaaaacaccatcatttagtcaatcagtaaccgtagaagataggggatcgaccatacgatttgagaatgtatatttagtaaaatattcagaaaattgggtgtagtacgcgtcgcttggcgtgttgttaaatgtccaggttgcatcttgaacaacaatctccttggaaatcgcgtccttgcctggcaggggtgcggtctggacctcgctagacgtcagatgcgtccaaagatcggtatttggacgaaacaaggtccggaactcctgcaagttgcgaagaaagggcgtggtctcattatggtaggccaatcggctgaacatatgcaaaccagtctcgccatcgcgcaggaaccagtactgttggaattgctgtcccgtcggagtatatgtgtcactcagaatcatgcctccgtatttggttccagttgaatctgtgccctgcactacctccgtgctcggggatgtggcaccggctgtgtagaagcccgaagggatacagtaacagtcgagatagggccctattccagtggatcccgactgagtgcccaacaagtcctggccatccaaagttagatcgactatctggccgacactcttctggaggacagccgtgaggcgagcattggcgagagtgatgtgagtctggttttctgcgatgtgtagcgccgtggcagcagtagcccctgccgtgaaggccgtcaataaggaagcccacatgtggggcatcggggtcgttggttttcttttgacagagtcatcgtcatgaattgtctttataaatgactctaatatgccgggaaatcaatagcccgaatcaaggattgcttgcggttccagttcggttccattcctctttgaacacggattttgagatccacgaatgaattgggaatccatgaatcataccaggaactcacggcttagtctagagagaacgcactccacatcaaccccaccgggggagagattatggggaactctggggatgcggggctttgacggagaaattgctcggtcattgctcacccgagttcgtcgctaaaggggatattttcatttctgagatgtacggtggtcgtattttcgatgaaatcgtatagttatctcatgaacatttcattgtacaggttagacatgttcatgtaaaattgacccatcctagccaagagtcggacatgtgttgcatattcccatcaagccaaccgagaaataagtcaggatcgtcgatatccacactgtcaagcaagctagcatcatcaatcaacttgtcactagtttcagtgtcttctacggcagaggagagaccttcgacggagagaacttggtccaagacatggcggattgccttttggccctgctgtgcgacacggtacatatagttagaatcattgggttgaatgatggtgtccagatatgccgcgaaaagagtcaaattttgaatgacttctgaacgaggaaactccggagaagagcttgttacaggcgatcgggatcgacggagtaattctgcacagagaacaccagcagaaggaagacccggtaagcatacctagtgagatttcagcgttccggctttctgccacaatcaaagctaaggtcaacttacattcagtccgatatctttgatgggttgtctagagcgagtcttctgggaaatcataataaccaatgttttcagtatctctcgagcgatgccaagaacttcctcgggttgcgtctgggtacgtttgccgagggtccggtagagcaggaaatcgttgtagagaaactctatgtgaacctcgaaaaggagatcatattctactttggaaatgagtgccccgtcaatattaggtttccaatgaagaaattccggtagtccctgtcgtaattggcgagattcgcgtgaaagctccctgagaatgtcagcaatgccctggctgtgaaattaaactgtcagcgtactcgaccctttggctgagattgtcgagttgccgactcagtgaaagttccaagaccttctcacggaaaacgctagtgatcaaggaaattcgaggccacgttcccttcatcaagcttgactccaaattccatccagtctcctcatccagtcgagcaatagccgcattacgaacagcggaatcggcaaatacttcctcaacgctcaagtcaagtggcatttgaatatcacagtagcgccagctgatgagcggcgggcggcctagaaaagtggcaagtcctttgtccataaaatacgccgcgaccatggttctttttcgcatctcagaaagaaagaatggagcatttttgctagaatcctgatgcagcccgagcgcaaacagcgttgtcgataactctcctaattttctccacggtcgaaagtctaaatcccgttagacaatgcgagcaggcaaaagaatgggataacgaaccactttcaccatagactattgccaaaagcgtgacctgatgcaatagaagccaggccacaatgtcattcacaattccagtgctatcacagaactgaagacatatgtctcccacagcagtcgcagttacagcgagactcttcggatccatcatattcggacgcatgaagacgcggtcactatgagggacccagtctgtggctagacctgttagagtaaagagcagcccaatcaactcccatctcccggccgcggcagactggaaattttcccatgtcattgaagggtacacatcaagcgcccggctatgcgtttcaaacagtttcttggacaaaaagaaagctcgctggttggtgttcataccctcggtttctggagagttccacatattctcaacgagagtaaaaaccatgttcgtgactggccaaccgagactccatccactccatatcttgaatcgagcggagacgacatccctataaaacggaagattctctagaagcgctaagacccgggcaccgagattgatccgcttttggtcaactggaaagttctcatggcctgtgaggtatggaattctgtcatgaaatccgtttctcgtatccgtgaacgcatcgcagtaactagtctgccctagaaatccaggggccgagactgacgcctttttccgagtccagaaatcggtctcattgggcagtcgattgatattactaggagtatctgattcgcacacaacgcggcgttttttagaagggcgtgttccagtgagtggctgcgttaatggtgctgggtgataggtacagtggagaccgcggcgctcacagcgtccacagatgggacttgtatgatcgcatcgcaactttgaggtacgacacggctcgcatgatgataattgaccattacggcggggagtcgccattataagacacctggttgattagaggattggcagtaaaaaaagagactgggaagtagtcgagcgtgttagctatacaacatagtatgtacttgtcggggctcggccctcggagctcggagttagatgactaatgatcgggtcctatccgggggccggtcgggggccgtacattccgtactccgtatggcggctcgttattatccgtctatgtgggatacctcagcctaagtcgggataatgagttatgtactctacagtacggaataaattcaaatggtattggataaagtatccggtgttcaaccatatattccaccatggtgttcaaggtgttcgacactactttacccacgagatttaccaatgcaaccatgtatgtcatgtgaatagtgtaatatagggggaaaagccaaattcggaatcggtgaaagagcgttagatcatcggcaatgaaccggcggaagaggcggatcttaattattaggcgacaaaagctaaaaataatgacaaccttggaaaggcgacgatggtggccggatcctggtgtcgaatcatgtgcccattcacattgaacgtaaatgaaagcgtcaaatagctgagatatcagtcggccgtcggcaaataagatcatcgcatattcccggggtggagctcggagaccccatgggacagcgccacccccgcacaacgggggagtgcacggactaggccccgtgttctgagagacaggagttttcctgagaggcaggcccttgcctttgacatcctgctccctccaactcggctcggtatatctcacttgtcgcccgcgatcatcgcaaataatcgccctattactgcaactaattccttgaccccccaccctacctgtccatccatggcgaagagacgtcaaaatcactcctgcgaacaatgcaggaaagcaaagaaagcctgtgatggctatattttaaatagcggcaaagccgtattcattgaagctgagagtacgttcaagcccctcgacaaccccctcttccccacacatccatcccttcggtgctcccacaaatatgaacagctagctaaaatgaatccaccgcaaagattctggcatgccctctccatgctcgtactgcattaggacaagcaaaacctgcagtctgaaccctcactggggccaagatgatcggcaaacagaagagggcttgtcgcgctcagaaaatatcggactagatgatgaacaacgccgggacaaaaggcagcgaattcagccaccagagaatgagatcgaggcgtcagtaacacccatttgtacggttccttgccaaacttcacccacagaacctttacatgcgcctctgccagaaaataacgtggttgattgggacgcgctgtctgcgcctgttgcccctcattccattagtcagtcagccctcgcgggggctcttgcgggatacgataattgttcacacccaggggacccggggcaagtgagctccatagctgtacccgacaacaagcacgcagaccaggtcgaatataatggtttggatagcctcatggattcagcactggccaattccaccacccacgattctcactactcggactttaattcacaaaccttcatccctgatacaccccaaacgcttttctacaaccccaatcccgctttctccatatcttcagtgttggaggagagaggccaaaacgaattgtggagggggcacaaaaaacggaaagatatctgcgactcgcaagactattttgccatgacactgtctctatttggtgcgggccatctcgctatggaaaattcgaaccgagttctcatatccgagagccttctgcggatttatcatgatgttctagagaacaacctcgggtgctggttggcagaagatacatgcccatacaagatgcggcagaggcggcacgagccactttccatcaaccagagcccgagttcaggacaaataccgtccgaatggggcgtatcatggacaaaccgcatgtactgtcgtattaaacagctcgatcgatccgcccggtcggcaaagctgattcatctctctgcatcggaaaatcgagcggcttccaaagccctcgagctgtctatcatggcatttgccacgcagtgggcccagggaggacggcgatgggatggtcattggctggtaaataggtgcgaggatgaaggaatgcgcgacgaatttgggcagacactgcatcgatctgtttgggaatgtgcaaaccaggcgctccaagatgtcacccacgtggagtgttttagggtggtcttcgctgagttggttttcggtcttatacagaagccgtcgtcaaactatttcgatgcacgcgcaaaggataggcataacaccgatcagaacaaaagcttgaagccttcaacgctggcacaggtcatgagcatcattgatcagggggaaccgccggtattcattgagcgaggggctcgcaaaatccacgtgctcaaataccgattcaaagcgcgccaggcaggctttcacaatctcggcactaaactagacgagcaagtcccggtagagttcagtacggaagagacccagacggtcggcctcttgtactggctcgcaatcatgtttgacacggtctcctcatccatgaatgagcggccagtcgtcgttcccgatgacgaatgccaacacgaagctgcacaggagacagtacgaaatcccactcaacccccgacctctagccgccggtgggaactcgacctctacgcccaggaggatcccgagaaggcactagccatgcgttggccttgcccgtacgagttcgtgatcagggccctccccagatcagcagctgtgaaagtgctgctcttccgctgcatctcataccttcagaacgccttgaaaaatgccgaatgcaacaaagtcgtggaagacattatccaacgcacgatatgcgtgtaccgctactggatgaagacgcacggggctttattccgcgacctgaccagacactacgactcagtccctccgcggatcaagagctggttcccgtgtattagcatcccctggcatctgggctccctcatgctggccgacctgatcgagttcgtggatatgaacagtctcggctgcgatgactacatggcagagcgtgaagatgtctgtctggtaaccaaaatccggaaagaaagctcaatcgacatggcagaccttgcagctgtcctgacccctggacctttggggggaataggtctaaaccaactgccgggctttcacttcgccgtcaatgagagcccgcttttgactgagccctggacggtgcttctcgttcgggcgttttccaaagcttcaatattccacctgaaggaaatagaaaagctgcagaagtaccagcgtttcgtctttgatcatgagagcaaggccctgcagacgagtgtcgcacgcctcgagaactgtgttacggctctccgattcctgggtatcaagtcagcgatggccgaggctatttctatagtactatctgaatcgctgagtaaatgccgaactctgggctgattttttgacaagccaatatccccttttttgaatctcgtcatatgtgccgtttgctatgggcttacatgtttggtgttttgaattttgatatccatttcgtgcatcacgtttatttcaaggctatgttagagttcaagcttatctccattgaacaagtacaacctgacagatatgacctttttttcggctgaaaagaccttacttgatactaagtgagtgcgattgtttttgtgcgccaataattgctctatccatcctgtaatagttagccagtctacgcttctttctgccaggactcagcaagacatcatcatcaataaatcctcaagtcaacatgcagattcctccctccttcgacaaatggcggcatatatatggcatcctgctggacccccagtaaccttcggtatacaaatgccgcgtggatatcgcatcagccgatcatcgcacctacctataaggtgccagtcaaagaaaaccggtatccaacctgagcggtcacgtcgacctgaaggattctcaccctaattattaccctgtctattgtccactcgctcttcaatttacaattcagggatattaccaaccctacaaaatcagacatttgacctttcgcagagtgcgagtgattggtctgatttaattccgaagcaaacacaaaaaaaaaaaaaaaccatacaacagtgaggattcgctggtagtcacccacccaactactaactcaccggcgtgttgcttatagttatgcggtcaatagttcggtgggtgccgcccgggtgataaggtacgctatagacagggtgagaagccaggtgagaaatcacctaagtcgcgcgactaatgcattgaccccttcagctgaacagaatttcattggaccgtgtcgttccccttgatggcatcttggcatctacacatacctacaactagaagcattatacaccccaggcactaagcaggttgaccgtgcaatttgttgggatcatagcacatgaccttgtttgtcaggactgtcacatgccaactactaaatagtctcctctctcttctcttcttcttttccccttctcatcatcattaacggtgatcatcagcagttagcacgaatacatctttgcattgctgatctctattctcctgactcgctgtcacaattccaattggttggtctgcttataaagctttcttgaaatcggccgggcgtgcgccgcctccgtcgtccggtatggattgtggcttcctttgttctttggccggaagaaaggatcggatattagaccatcccaattcccttttacccggccactgcgggctttgtcccctagttacttcgtagcctaagggtacgatgggaagaccacgacttttgtgatatctcatcccgtgatttcttgctgtctgaaaattattggctcttggtggctcatcggtggttgtgttccccacgattgattggttactagcatgtccgtacatattggagtatagggaggatcgaaatcagttttaccacctacatacggagaatctttcttgaaccctccttctaaacatgctaatatcaatcttgtgacctctatctttatttatatatatatatacatttcgtttctaattttgggtttttctttctttctggatttcagcttgacctatttcatgtagatactgtatagttttaacttcaactttaatatgaattttcaaagtcactgagagactactatatccttttcagagttgatacgacttacctcgatcagattacattgatagttctttcagttatatcgataggcgataattacttctttcaagacagaaaccaattaaactgaatgcatttttttagatccagtcaagaatctagtgaccaactagaaggtattggattataactcttcaatcaagtaagactaattgaataagcataccatagagtcattgtccagtctaacagactataacgttctagagtccgttacaaccacatataccggacaattcgcgttacttacattctcgcaataataataaacgaaacctttaaccaggtcagccaataagcagtacagcataagaaatagcacaatatacccactatatatcctagtccttccgtaactcctttatcgagctacctaatcctctttctctatgccataataacacttcaaacggcttcatcttcctctctatacgaaagagcataaaagcattatcctagtgactgaaaagcctatcccttgagtcaaataggtctaaagaactatctaggctcacagtatatctccaacagccttctctcttcagaacactattcaacttctatatttattctattcctcaaagaactatccgttacctcttacttactcaatgactcaggcagaaagacagtaagaaaaggattcaatagctacctgatcgttcttaactggctcaaggtacaatatctattcaacttaagaaattggccgtgcagaaaatgtggcttaagtacggctgttttccacaccctatggtcgtaagtgcttgaaatagcatcaaaaggatttatatagacatcattacctgtagaatgtagatgtggtgggtgagagtcgggtgagagtcgggaatcctgcgggccggcgtgcgtctacgaggcgggcttggcgttttgctgttaaatttcaaacgcaaaggcgctttgatcggacttgatgtgagccagggagctttacgaatagtaggtcttggcagataaacaacaaggcagatggctgccttcgacctaatccaatatccattacgacaattgagctggtcgtaagttgtaacgaatgggaaaggaaatgatgaaataacggaatttataagcaagcggagcgggccgcccggtcagcccggtcaccccataacataagtaaatgcaacaaaccgaatcaaatttccactatggagtactatagcttagtttcaattataaatttgatgtagttcaatataggattctacagcattaccttaaaatccatgagtgtctgctaagatcaattgacggtcgttgtttacccctaaacaggacggcggtgaggatcttgggccctgtaagcacatacctgcctttaattaactacggagtcattatccctacaacatatgaggtttacggatcggcgatggtgtaatcggggctagactcagagcaaacaccagtggccacatcgattcccgcatgcagtagggcgccccgccctccacgccctttgacatttgttatataaaattatactccgtacaaaatacttaaagagatgccacagtcttgataacctgtaattgccagacttccgtggtctctttactggagcgtttagcagccaacaccaatatctcagcccgagtgaatgggtcgcccgaactcggcggaggaatatggtcgtgatgcccctccagacagcccaattacccttgatgagaaggaagatcctaagagatggccgaaaagcagaaaatgtgagagacctcttcgattttgaatctctaccaaagtaataatatatgggttaactgacgattatggctatatgattagggctctatacggtgattgtggcgctgatggctggagtaattgccttttgttcgagtatctatacagcaggaaccaaccttattactgtcacctatggatgttcgcagacagtggctactctaggagtgaccacctttctactagggtttgcatcggggcctctcatctttgctcccctgtcggaattatagtcagtctatgttgagatactcctgccttcagccgcttataccagtattaatctagcggtcgcaaccccatattccggctgacgctgggattgtttgtcctcttccaaattggttgcgcattagccccaaacatagccgcgctgataatctttcgattcttagccggctttttcggttctccgacggtcacaaactcgggcgcgtctatcacagacctctggccgcaaagcgaacgatcagtacctttagctctgttctccgccggtagcttccttgggcctgtttttgccccggtagctggcgggttcgtctcggaatacctttcctggagatggaacttctggttggtgcttattctaagcggagctgtctacgccacatgcgtgctcttccttccagagacgtacgcagccaagcttttgcgggataaggcccggcgcctgggagtcgtccagtccgggccctccctccaagagcagctccggacctgccttatccgtccctggctgatgcttttcgcggagccgatcttattcctcctctctctctacatggccttcatttacggcattctctacctcgacttcacggcgtatccgattgtatataaacagtcccgcggctggtctcctggtattgcaggcctatcctttctcggaatgggtacaggcatggccattgccacgattgcctctccctatgtaaatacgattcacggaaaatacgtatccaaacttggtcccgtcccagaagccagactacctcaccttgtgatcttgtcttggctgatccctgtcagcctgttctggttcggctggaccgccctgcctccggcgcattggattgtagcaatcatttcgggggttccgtttgggttcagcctgatattacttttccttggcatcacatcttacctcacggactgctatggtccgtatggcgcgagtgcgcttgcggcaaatgcagtcttccgctcagtctttggagcggtatttcctctctttggaacgtatctgtacgacggacttggcgtgccgtggggatcgagcctgctaggtttctttgcactagcatttgctcccctcccgtgggtgttttatcattttgggccccggattcgaatgaagagcaagtatcatagaatgatgattggtgatggggcatagggtttcaatccacttctttctgatttcctctctgattatattgcaaattcatattagccaacagcggggtttctgaatgtacaggggaagaagaagaagaagaagtctataaacatacttctttatgtatgaagatattagaaatttttacaatttacttttgacactttcaaatatttattttgcaagagatattgatgagaattcactacagtggagatcccaaatggagaatcaatgttcactgtaactagatctcgatcgtttgtaggaatcaaaccttctacatatctctctcaccgcttcaagatatattccatctgatagaattaggtagcaatctttaaaattaccaaccactacttttcttaaagagattgaaaatctacaatgtcactattacatactatgattaattataaaactcaatttcttaaaatttcttaatattaataaaaaaatagatgataaaagtagtattcaaacctaaacagtgctaaataacagtaatttattaagatgacttagcagttttatacgtctaaattgagaaaggtcaacttttttaatgcaaatgagggccctcagagtgcccgctctcaaaatgtttttaatgaggtctacgtctccgtggcctacctaaggtcacctgaccatccaacatattgacggccacactccatcgtcacttccattcatcatcaattctattgattttctttcgttctcagagttcttaactcttcccctctcacacgaaaatggataaacaaacccagaccaggcgttgcgatgaagttaagcgactctacaagctacttaagagttgtgaatcttggtttctttcccccggtgatctccaaggcctcggaatctatagccagcaagttggcatgacaggtgacggctctgtacaatttggtccatgtttctttcggccttatccggaaaaggtgcttcaaaaatatccactcgatacggtttcgatggctgcggaccatcctccacagactcttcaacggcttaataacccccgggacttccagactctgttacgagaagtccagaatgaccctaaggtcgaacatcccctggaattcgctaaatcaagatgggatacattgacacttttatatgggccggatgcctgggaagatcatgccagacagacacgttggcatattcaatcccagcagatgcttcctcggagagggctttcccgggactctactctcagcgatctaagatctatctacgaacggaggttagtgcactttgctttttctcttttactctactgtttttagggactcaatatactaggacgaaatggaagcatagcgctcctgaactatgtggacttaatagaaggaactattggcgtatactaagtctccgagaagtttttcagccaagctttaacccacatgcaattatagaacttttatccgatgttcccgcaaatcatgcagagaattgccttactctccaagaagtaagcgctgttgtaaccgtgatggttgctcgaacatccgatcggccgttccgggaccacccgatccatccagttagtatcttacatacacttcctagctactagagatttcctaagcactcacttatttttttatagttattggttctttcatacactggacagaatcatggaagaataattcaagcttcattacatggagaaagcttgcttttgcaatattctcagctatggagttttgcggatgacgaaacggcaccagttgaactcttcattcgttatgatatgagccagccagttccgatagcctgaagagccgaatcctattattggctctcttgtcggccctgttacgtctatgagcttgaattagctatttaatacagaccctaccacaaagtattttacccacccgcatttttaccccaccatcacaaaatatatgtgaaggaacgaagccaaattgattcaatactgactaagtcgacatgctgtttacaaaaaaagcttggagaagggaaggaatgaagcaagcgagacaataataaggatgacgggcaaggcggtggcagaacggaagcgtgcggagactagaaagtgccttttgaaatttgacgcccatcgcccaccattatgcaaaattaatgcaaaaattaccctattaggctattttatgtacataaccagatcttggcagtaccaattttgccaagagtgtccgcatatgtcttggcgacgctaaaagtgtctccactttaacgggcgttgtcacagtctaaccactgcaacaagtcagttctcatgaactgactttgttatgaccttttggtctaatgggtaaacgttggagcagtggccgacggatctcataagtgcacctaaaatcaatagctagctttaactacgaaacaccggcttgataggtatagataatagataagcgttgcttatataaaagctcaccttttactctacgtaaagagctattttctgtgcctaagagagatataggggtggtgtaggaagaagaaaaaaagtgagtggtggttagcgtgatttcaaagtggggccaatcttaagtctctccctctaccttcttcgctgccttcttctgttcttcttctgttcttcttccttaacagcatcagcccatctataaccgttgttctcgaggtacccggtggagaatacatatttaacacccatcgaagacggaagggaggcgtcaacgtggccgctagcgaccctcctatctccgaggcagcatcatcaccatgattagacgtaggggacactattatgagattagcatattgcaattatgatctagactttgagttctgatttcatgtattcagactggttcaatgaagatcgaagacctttcagtgacaacgcaaaccgagtctgagtttaggtctacgctacatcgcccctgccattagtcgatgagcaaagcttaaatagaagcttgccttgaccaaagctaggtattatgtacgcatttttgttgccaagttatattcaatcaatctactggggaagagtgatttgtatgaacatcaagcaagaggactcactgttgggatcttcttcgacgacagtctttgttggctattgggttggtgtcagtgtccttgtcatcgtcgttcttggtagattgccctttagtagtattagtacaatctttgacgactgaagaacctagattaagagaactcacctgtgggccttttatgtcatcacttcttgcgaactcgtttcagcccctttttcgcactggtttgctttttacgatcatgcttccgcttgatcctggcagtttgctacatgaataagggtgtgtcagtaattacctgatcacttgctatgagacacgagtagcgtgcggcagcggcacggtatatctttttatatctataagtagcactaccaattttagggctatacgaacttgaagatatatgtttgaaaccttaagatcttttgcttaggatccacatttaatattttacgtagtactccttatctttaagtacagccctataacgtctcgttatactcaaaaccaacctgtctatcttcgacaatagcaatagcatccaacaacccgggcctacgcatttatatagtagcaacagaacaatgtttgtggcagtctcattcaatgaagtttcgattaaactatcgtctattggtcctaaagttgcaggataatttctgtatagatcaatacgacctcatctggtgcctcaataagacctgtttctctacctaggtaggtaggtacctagccctggaggtttgtgctgctttgtcagctcaaaacaacctttggtttcgttaatggaaaggcaagatttctcatctttctcccacaaacactcatcggaaaaagcagatttcaagtaaccatggaaccccctccaacaccccgccctccagcaccgaaggtgccctcgaccgtcagtcaatggagagccagcgcgcgcgattgccacgtcctgaccaaaaatccaagcaagctcgagtgtctgcacccaggttcaaagctcacgttcaaggaatatctcagcatgaggattattcggagggtctccaatatcaccgagttccccgaccgagaaactgaaggtagagccaaggagatggtcaagggggactaagcaatacagacgtggctctcatatatcgaaacggaccagtacccaaccgaccgaaagcttggcatgttcgccctagtgagaccaggtcagcttgcgatagtagcttcggattcccaggaaccttcccagacagttgaacttcggcgtcgagatcgacctcaagctcctgaactatcagcagataccgcgggacgcagtcctagtgctgccgcttcaactgcgccaactgaaccgtctactgccgcttcaagtgtgccaacggaactgtctactgcagcctcgaggaagtgggtcaagtacgccagagcggatggagaaccgcaggtgaaccaattcgtgataacgctttgacactcagcgtaggccagagcgtgaactgccaatggtcccctaatggtaatctgttcggtagcgtgtcttttggagaagtccaattaaccgcatatgtcgacggataccttatgggagtcaagaaaagcgatatttttgctattgtggaggtaaaggcaggaatccgggaccccgagcaatatccgttggtcgagtggcaagaaggcgcagaaatggtcagctggatcatgaatgatgaggagaatctgcgacatcatccattcgaaacgtgggtggagtgtgaatattcgcatattttcgtgctaagtgctgtaggcgcctcttgatctctttgaatcgacatgagatgtatttgacactcgcccgctaccacgaggactacgtaaagttcctaaagggagaatttcaagggttgaagagctaccccgagaatagattcctccacttgcacgagtacggcccatgggatatcggcaagaaatctcacatgagggacctggccgaaatcatcgtaggtttctctctccgtgtcaaagatgaacaggctagatcggctgtgccatcagggagtggtcctgacggggcgtgagcacaatgtgagcgatagacatgtctctagcgtgtccggtgcagtatcattccattacaacggtttctcgaaatcttttctctctctttcttcctttcttcccctatacctgttgtctcacatagaggcactctaaatctttgatcaaaagtgggtttccacatcgggccaataccacctgtccttttgtctcctttcatcaccattcttacctccacagctctcactgatacacgtcaagactcgccccgaaccgaaccggcttgctggccctacgccctcgaccccacctgccgctccgctcgcctggctgagagagatccgatctacaatagatccgagccctacgatcatggtaaaaaccatcacatcttagtcgcctataacgctaactactaggaacttaatcttaacccgctctatctgatctcggtaaccctataggtaggctgcgccaaaacccacgaaacccaaaacccaagccaatctatgggcgcctattagacctattaaatcgtaaaaacgtgacgttcagatgatgattttatttcatatatacattgaacttcttttcaatgataggcccagtcactatcatcctatcttgttcgcttacgagctctcactgacgtgcgtaagccggtgcttctaggatcggattccggaagtggggcatcagcctcagcattagaaatcccagtttgttcgtgactccgggcccaaagttgggctttacggaagcctaggccggcccgtaggcgggcactgtcgtagtctacctacccattgagacccattgaaattagacctagataaagcctataggcgacggttctgaccgcgctcagaaattgtagtgcttacagaaaggtataagctatataatttcacacctcatcattttcttagaggccatacgagtgaataacttccctgaggacaggggctatcaacaaaaaaggctgatcaatgttaggtggattcttagttgttgaggttagtatcacagaatagatggctaacaaatgatgcacatgtcacgttgttaaattgttccatctctgcctttattttcaggccgtagagtgagcaagtctttgcgctcattaagcgctgtcgcatacccttgagtacactgagtaatcaccctgtgctgtgaaatactcagtgaacaggaccctgagccccctcataaggcggcggcaccccgatcgggaaattcgcatccgcggcctaaaatccggtacatacagctacatatgtaggtgtcccgcagatccataaaccccggtgagtagattcgatcagtcttagatatgattctgttgggccatgatgcgtgcgacacctgggcagtcgggtccgctttggttagggtttgggttcgacccccccccccccccccccccccccccccccccccccccnnnnnnnnnnnnnnnnnnnnnnnnnnnnnnnnnnnnnnnnnnnnnnnnnnnnnnnnnnnnnnnnnnnnnnnnnnnnnnnnnnnnnnnnnnnnnnnnnnnnnnnnnnnnnnnnnnnnnnnnnnnnnnnnnnnnnnnnnnnnnnnnnnnnnnnnnnnnnnnnnnnnnnnnnnnnnnnnnnnnnnnnnnnnnnnnnnnnnnnnnnnnnnnnnnnnnnnnnnnnnnnnnnnnnnnnnnnnnnnnnnnnnnnnnnnnnnnnnnnnnnnnnnnnnnnnnnnnnnnnnnnnnnnnnnnnnnnnnnnnnnnnnnnnnnnnnnnnnnnnnnnnnnnnnnnnnnnnnnnnnnnnnnnnnnnnnnnnnnnnnnnnnnnnnnnnnnnnnnnnnnnnnnnnnnnnnnnnnnnnnnnnnnnnnnnnnnnnnnnnnnnnnnnnnnnnnnnnnncgggggggtcgggtccgctggaggtacggagaagatcggtggggtataaagggggttgtgcccaatgaggtctgaggtaaagtaaactttcatatttttgggaacgaagggatgatcaacgccaggttcggcgtttgagacattaggtgtctcaactccacaaaatcaccatgtgacgcgacaaagatcagcaaggttttcaaactgggtccggggtccggggtactaccgttgctgcacagtatctggggtaggtaattactttggggtaactactttgctgcagggcttgaaaatatattgcgtctatatatgtgaaaagagcttatttttgattgaaaggagtttgagtaaactaaatatccagggtacatctgtattgtttcccattggcctttcactaaatatccgtccctcgcgtcccattttacttggctgatgaacccgcctttcaaaacgcctgtacgcacgcgcaattctgcaaactaggtctaccaggtagagctgtgatcaatccgacttcttctgaagttgcgatagtcccgggacatggctagagagatcacccacgggaagccgcagagggaaatcgacggattcaagcaacaaagaaaagagtaaataccatccaccgaggcatgctgcgaatagcacagctcctccgccctgaaatgagatcgattgcgtcagtaacgagaaaattaaagataccgctaggggactcactatttggaacttcccagcaagtactgtctcctgcatagccaagtaccagtaggcagcattgatgaggccaactccaataaccacggtgaaaaggatatagacaaggacaaaattggtccggaaggagcagatcaagtaaaagaagcatagaagattgaaacaaactatgaaaaatcctgtataccatttgatcgttagaatcttgttcacgctttgctcaaaaagcaaggtcggaagaatgcggtggttgactaaccaaagctggcattgaaaccctccgatgtgagtcctgcagtgggatcatcagggtttggtgaataggctgcgtaggcattgtagaagggctgtagggtcgtggcgagggtgaggtagaagcatgctgcatcattgatgttattagtatttgacatatatttggaaaggccacgagcacagtatcacttaccaaaggacatgaacaccacggatgagaaggtgttaccgattatacactctagcaatccaccaacaagcaagagaatgcctccgaagaagatgtatgctccactgaaagaatagcgagttagcatgcgcccctgaatatggaatcagactgattccaattactcacatatgagcaattccattgttgccagctcctctccagcccatgagggaaaaagagagaggagtcaaggccatgacgaatcctgtgatggctctacgctggtgtcagtcatttcctagaaggggtgatcggaacacagctgccatacataggggttggattgccaatgatactccgaaggtttccagcaacttgaggtttcggattcaagtaaagcttctcaaagagttccggagatagcatgatgcttcctctagacctggtcctctcaaaggcactagagtctccattttccgcatgctgaacgtcgttggcaaagttcacgccctcggaagtgctcgaatcagatgttttagccatgtttggtaagatataatggtgaaaataggggtgttggcaaagatagaattaaaagcagcttcaaacacatggacacttcctaagcaatatataccgtggtaattactagctacataccaggatctaatgggaccaaactttccttgcctgtttggattctggggtaccggaaacgtcctgcgagcagctcacagcagaaaaagcttccactagtgagtctagacgggattccaaatgttgtagatctacatcgcccccgcgttgaagcagagcggcagcagatagtttgtgggggtgggcgtaagctatcgattcggatatacggagaaggagaagcagctcctgcgaatcaacatgcgaatagcttccgccatcgcgaaccccgcattccagcccctattcatggtcggaggagcggatgcgctctgcaagacccctagaacctggagtagtggagtgcggtggagccgatgatgcggggccccgtaaaaaggcgaagctggggttacagccaccttgccgccttggaatttgactggtcattcctcccatcctacattcccaacccaagtcggaaccgctccccacgtcgagaaactcccaccttcgcgaaacgatcaagatgtgtgcctcagcggttccaaacaagttcaccgaataccaagatagcacgctcacctgagcaagtggattggattaattaggtgcccccgaaaaagttataaatcccctcaactatccttctttctcgatactcataccatccgaagagaacaatacatcctcttcaaaacttcttgcctttattataaattttcccttatcggtctttccacaatggccagcgcagacatccagcagaatatcccctcgcacatccgtggagtgcccggctcagtcaacataccagtagcaagcttcccagttccctccaagtgtgccacatgtgaaccagaacacgttgcatcgacacttgttgaggctttcaaccttgccttggccaaacgtgacttcaacggcatcgccaacttattcggagacaatggcttctggcgcgaccatctagctctgacctggcagcttcgaacagtgcaaggccacgaagcgatcgtgaaattccttgagagatcttccgagtccagggacggcctgcgactcaagaaaatctctattgacagaagcacccccgttcgcgccccgaaagtgtggtcacttgatggagctggcgaagttcaaggtatccaatttttcttcaaggcagagacatcccatggctctgcgaccggaatcgcccgcctcgcgctgcagaaccacacgtggaaaatattcaccttgttcactggtcttcaagagctcaagggccatgaggagcttcttggacgtcggaggcccaagggcgcagagcacggtggtaacccggatcgcaagaattgggccgaaaaaagagccgactctgctgcttacactgacggtcgcgagccaagtgtgctgattatcggtaagtttctatcttttcatcattttgaagaacccagctaatccttatttcaaaggcggcggacagggcggtttgaccgcagctgcgagattgaagatgctcggagtggactccctcatcatcgataaaaacgagtccgtcggggataactggcgactccgataccgtcagcttgtcctgcacgatcccgtgtggtacgatcacatgccctacatggagttcccagcgacttggcctatcttcaccccgaaggataagctggctgaattcttcgagtgctacgtcaaaatgctcgaactcaatgtttggaccacaaccactatcaccaattgcgaatggaatgagaagactgccaactggaccgtgaccctttctcgcaaacagaaggacggtaccactgaagagagagtgttccacccgcgccatatcatccaagcgaccggtcattccggaaagatgaagatgcctgaagtccccggcgtggacggcttccagggtgaccttctttgtcactcctcgcaattcccaggtgccaagagaaacagccaaggcaaaaaggctatcgttgtgggctcatgcaattccgcccacgatattgcacaagattatcaagagagaggctacgatatcactatggtccagagatccacaacctgcattatctcctcaactgccatcacaaagatcggtctgaagggcctttacgaagaggatggtcccgcattggcagatgccgatctccttctccatggcactcccacaccagttatgaaagcgcttcagatccatatcacttcccaagaagcagagcatgataaggagcttctcgaggggcttgaaaaggcaggattcaaggttgatcgtggtccaaatggcggcggactcttcgtcaaatatttccagcgcggtggcggctactatatcgacgtcggagcctcccaaatgatcgtggatggcaagatcaaggtgaagcaaggccaggagattgctgaaattctgcctcgaggcctcaaatttgccgatggcactgagctcgaagccgatgagattatcttcgctactggatacgacaatatgcgctcgcaaacaaggacgatgctgggcgacaaggtcgctgataaggtgtctgatgtttggggctacaataacgaaggagaaattaggaccatgtggcagaatagtgggcacccaggattctacttccatggaggcaatctggcgactgcaagatactattctaagattctggcactccagatcaaggctcttgaggaaggtatctataaccatggtgaattctaagcggacgggtacggatatattgtttcaacatcatctacaatttgtttttcctccaatgcttgttctctaactatatcaaattcatttatcaactccaagattgacttttccaatatttgaatgtatcagtactccgtacagcagggtgtaataccttgggcagcggggcagcgaaaccgaatcgccggtgcatctcggttctcgtactaggtgggtcaggacaatgagatgaatccacacccgtgcaaaggcatacgtatgtttttgcctaacatggaacgaagcattgcccataagaaatgatcaacgagcaaataaccacttctggccctgaagacttccatgatctgcatagtttgttgggatatccgattaaccagccacaatattgggaaaatagaacccaacaaccatacgagatcctgaaggatccacttgtatgggtcttcctgggcaaatattttccccatattggttgtctgtctactgtatcatgtgagattggtttgctgaatttctagcagactgctatatccatgcatactacgagctacaaacccaattcaggtctactacccatatcactcaaatgaagaccatgaaagtatcgaacgacgccaggaacaggtctctgcatctgtggttggacggggaacagacggaccccattgctttgcaggagaacagtggatctattagacctgtatcctccgatctgctcggagttgccgcctgaagggtccacgagtatgtatgaagtttcaatatccgtatcgttttgtttcctgaatctccttataatggacatctgctctcgcagcaaaagtcgctcgcaattgaacaccctggaggacgcggccagctacgcacacgctacgtaaccatctaaacctgtctgttcgctcacattcactcccctaatattcggcatactaactaaaagtcttcgttgaagttcaattgaacgctagctatgcctttcgaaactcaggagccctggaaaagacagttctacagtggtaccgaatgtcccgagcatgtagtcattccattgaaggactacaatgcgtaccgcctcaatccggtgcaccgatgggtgtacaataagctggaaatcgcagagaagcagggactggcgtgtgcaccacatggaatagctcctgagaaattccctgtcttcagcaagccgatttacaacatcaggaatcttggagcgggaaccagaattcttgaagacatggaagactaccgtgagcactgctcgtcgggacatatgtggtcagagcttcttgaaggtgaccacatcagcactaacgtggcggttctcaatggcaaagtagtctggctatcccacacgctgggcattccctctggcggcggcaccttcgacagatgggaagtcaatatcgctgtaccacatcaggacgagcgaacactcgtggattttatagagctacacttgccagactacacaggcatgctcaacgccgagatgattggtggaaagattatcgagatgcacctgcgcttcaccaaccaatggcccgacctctatccgcgcgggtttttggatgccgtggttgggttgtatcaagggaaatggtgtccaactgccgagatggcggtcaatgacactcgaggattcagcgttgtcttgtttggtaccccgaaatcagagtcgtgggtgaagcccgagatgtcgctagttgaggccctccgctctcgccactctttgtacagcgtgcagatgcccttcactgagggcattccggctcgtcaccactctcaccctccagggggttatcagcttgcaactttcaatgggcccgatctaattcagtgcctgaaggcgcgggaggacttcaagaagttatttagtgctgttaacagttggtctagcatcacagcaagccacgtctaggtctattccatagagtgccacttggatgcatcagcacatagcgtctgagaaaatatgttgtcgcaatacgtcacatctctacgattaagcctctgtaatctgaatcccgctgtccatttctagccaatggatttcaataatcaattttgaccaacccaatggccacgatgcgttcctctcacgccgttgattcttggagtcagaattttcatgatctactatagatcgctatcacatgcttcatgtttgcttgcttgctcatttgcagaaactccagcgataaaagcaagccatctcctacttctgtacttgcttattctttccgtctctatcttactcccatcttactctcatcttactctttctccacatcaacatccacgtcatcaacctacagcgtccacccggcaccatcgaaccggcaccgtccatctcccattttcgacatcgacaccgattccccaccatccatctccgcatccaatcctacgtacttgcttatggactatgggttccctctctgatatgtcgtcaggcagtctgggtcctcccgtatcggaagcgcaatttgatgcctacacagctgcccggcagaagatgttcgctaggctgcataactatcaatcgctgaatgacgatgacgatacggtccacttcctggggtcatcttactctcattctgaattgaattcactctttcttcaagggataaacctggcatgtcacaagaataataccagtgtcacctccgacctcgccgagtttgtacagtcttttgaatgggaaaaagtactcttcttcctggccttacagaatcaagtgtcgaggcagcaacaattccctaataataatgtagcttctagttagttagtgactgttcattactaactattactaactatgactcataatgcgaattgacatgtagttagttaaaggtcaatcgatttatcaccaaacactacgtgaagaagaatcatgtcgagagcaaccatgtccacaatcactctgcacagcttcgctgcctccccgtttggcgaaaaggtgcgccttatcctaggcttgaaaggtttggtatggcagtcagtggatgcggaactcattctaccaaagcctggcctcacagccttgacaggaggatatcgaaaaactccagtcctgcagatcggcgccgacatttactgcgattctcggctcatcgcggaagagttggaaacgcgatatcccattcccaccatctttcctggcaactccaaaggactgtgcttggcgttgtctagttggagtgacagagacttgcatattgctagctctggacttgtcatcggagtcaacaaatcaaaattcccacctgatttaatggccgatcgagagaagtttttcgaaggtttcatggacttgcaccgtcttgaagaggatgtgcctcacctcaagactcaattacgcgcacatgcaagtttgattgaggaacagcttagtgacagccgttcgttctggctgggtgaagcgccgagtcttgctgatttccatgcttacgttgacatttggacggcacgcgtttacttggattttgcacaagaactgttcaaaaatttccacaagatgtctctatgggaagagagagtacggaagattggccacggaagcaaccgggtcattgatattgcggaagcacacgagtcggctcgttgcagcacacctcttcccggtcacggcgtagattccgaggatgcacttggactttcgcgtggggatgatgtgatagttacgccggacgactacggacagggacataccactgggcgcctagtgactttgacaacgcgagaggttgcccttgtgcgtgatgatcctcttgtaggacaggtggtcgtacacttccctcgtattgggtttcgcatctcccgttcttcgaaaccctagctagggagcccttcatttatattagatctgtacttctccacacataagcacgatggaaagaggcaaagggaggtctgtcaacctgcattcaggcagccaaagtcttaatgcatcactattgtttacatatctccagtcttttatgttgtgctatttggaggctttggaaaaatcccggaacgatattcatatgagagatgtcaaagaaaaggcaactcaaaagacagctagacagatgtcgtatctttcatactagtacagatctagatctagattcatgtcatacaactcatttcatatagctcatgccatctcaatctgctcatcttcggcacccttcttcgtgactgtcacatcatcagagggaataacatatgtcgcccactgacgagcaggaaccttgtcctgaaagagtctctcgatttccgcattgctgcgacctgcagtctcaccaacacagaaccacgaatatgctagcaaagacgtggttgttgctccgtagacaaaaccgatcatcggacctaaatgacccgtgtagtacatataggggctggtgaagaccataacccagagcgtgaggaagaagacgcccatggcgcacgcggtgatcttgtttctgttgcggccaacggacatttccgatgcaatagtgtacgagagggtcccgatggagaagttgtagaagatgatgttgatgtaggcgagaacaacgatgccgatgccgatgccacggctgaaggttccatcggatgctttggtggtgccgaggccgccgacggcaattagggagatgaacataccccctgagcagacgaggaggttcgtgcggcggttgatcttgtttccgagaacgactgctaggccgacggtaatgatttgtaggacatagatgatggtgttgatggtgaaaggatctgaaacaccgatggactgggcgaacacaacgccataggtgtaccagaattgaataccattaatctgctgcacgaacatgacgccacaggcgtagaagagcttgcggcgctcaatgggatccatgatgagtgagacccaggtagcgtccttggccatttcacgctccatctgaacttggtcttcgatagcttgtatgtccgctgagggatcatagtcgcggcagctgtggttgattcggcggagagctttgatggctttctcacgcttgcctttgtacatgtaccacactggactctcaggtgtgaaaggaaggcacagaagcaagataccgggaagaacaaccagcaggcacatgggaatgcgataagattgagaactggaaatgctctgggtgccttggttgacacaggctccgactaactgcgagatagactgcatgaactggaagcacatgagggccggacctctgatggcagacggcgccacctctccaatgtacatcaggcaagtagcggtgaactgtccaatacctagaccaatcaacacacgactgacatagaagactgagtcagagccaaatgagcacacttgcacgatggctccaacaatgatacaaagagaagccgacaggaatacagcacgcctgccgaagaagtcattgatgggagcggcgccaatagctccaactaactctccgacatagatgatgctagcagacaccgagaggaacgatgtcccaagagagtatgacccatctgcatttctctccccgtagtccttggcaaaccatgtcataccctgaatcccagtatagtagatcgtatcgtaaccgtagcagagagcaccgatggcagccaccatacagtaagcgatggcccgccgattcgacttccagtcgatcttgagatcaagacctgccatgttcgaagatctacgtttttgaggtaaaaaacagtaaactcaatagacttagaagcccacagaggaaaaagagaatttcagaagaatcgaaccaaccggtttgcaggggaacgatcgtatatatacctttttttatagaggaaaagttcaattattgccagaccaaaccaagaacccggaggcccgcatgtcggggtaaactccatggggtatgcgggccatagccgagtattttcgaagtctccatctaataggacccctggggccccccttccccccggctgatatgtagaccaagacatattttatagtgtgggtctccgcgttattcacgcactcacaggagctttttacatgaagagttttaccccagacactttgaagaaagaggcagcttcactatttgtagatgtcttcgagcaaagatctcatgttggaagagggcagatcgggctataagccgacaagatagcagcagaatttcggcaagtggtcgccgccaagcggaatcccgaaacggggatgtcgccgaaatttgacgataatttcgccatgcggccagtcaaagtttcaagatttcaaaaaactaccgcggcacaagcctttgtcgaggaaactggagtaatcggggtaatcggtaaccttgaaagagaagggctaccgacaatctttatctagcgatataatccgctagactaatttaggtaagtctgccgctggccgcaattctagaggagcttatgaagattaatatggtactcttgatacatatcacatgacctggagccagttgaaaattgcggccagcggcaggtgtacctaaattagtttagcggggactgtgaagattgtcggtagctcttccctttcgggatttctaggcgggtctttccatactccaacatccggggtggactatagattcgcttgcaatagccataaaaccatttctatcggattataccgggtcagagaaactgtgattttatctttatattggctctatcggcaacactccggtatttctttggccaaggtttcgtgagtcaagattttagcacgagaggactaccgaaacttggccaaacgacaaatcgggaataacacggctcagctagaatcccgtgaatccaatagtgcaaattcgggaaagagaggcattcaatgtagccgataactaacaaggatgtactgctactctcataattagcctctaaataaaacatgatagcaagcccatcatgcaaagaatttcgaagtcagaggaagcacacaatagaaactagaaggggcccttttcacatgcatctcagctaccttcgttaacgtatcacgtagggcttgtcacgattggcacttgcgaaactcgtactttcccgttcgggattgtaccgttggtcgttccttcctgttcgagggaactcgtttgcgcagacagtcgtaccttccttctgggataaacgaggatagggctttgcccccgaaggggtataaagaccccattgttgtttaacgtttgttttcttttctttccttctacatacttgatattcgatgagcaatgcacttcttttgttagaaagaacctggcacgtcacagggcttggccaattgtattcagatgcatggtacccaaccccaactccaagtatgaaaagataataaggggatatatccacatcaggaatggatggaataagtcaatgaatgtctagaccgaaagatctgcgtaagggagccaacttcatctacagtcaatttgtgcggcggtgtttatttgtcagtgagaatctacttcataccccatatgacgtgacatattccaacgtatgaacctatagccattgccgttaaggccaacgcatcaagagtgtcgagtgaataccaagccctcaaatgtttcagcgggaatatcaaactccttccgttctaagtccgactaagtgcctgcgcgtggcaccccagaagacctccacttgccaagaataaaacctggttagtctggacgtgtagcttcttctgcgagttacattaactagcgagaaaatcggtgtcggcataggaattactcgattcggaacctatacggggtttgatatggagttgagccttgccctcacaacgactctacatgtatatcttccaatggacaggggttaatgctcagcatttactattgtcgaataaaattgtaagaaagacctgtactcaaagctgccatgcctgttgcagacctaggttatgtgggccgaatacagcagatgactccgagtgccagtgtacttagaaacccaatgattgttggcattctgcaaaacaattagtaggtttacaatctagacatagccatatcctaagcatggtgtttgagaaggaaaaggcttaaagaatgagagttgttagacaaaagagcctgtgtccttctctttaggccgttcttaaaaaccgaagttcgacggttgatagatctaactgaattagcagaagccctaggggtccactactgctaactgttcaagaattgctgcgaaggaaaatatgatgctggagacaaaaatggaaaaaaggggtattttactcagccaccctccgtattcaaaatgagccgaatgactccaaaaagtttagaggagacatccatattcccgaatcaagagaaaatgcggttgggacattagactatgaacaattcccataattcaagcagcaccagaggacactgagaatcattagtgttgctcgacaccaatattcctttctatatacacgtctcagtcaatgacacttttctcgtcagcccagctaggctgaatagaccggcaaacagcctcataatcctggaagcgctgggtatcctccacgagcccaggcgttgtccagaacatagcccagttactatcagccagcttccaagtacccgaagaccgctcgaagtaccatttattaaccgggttgtccatgcgactacgccagcagactccattggggaaacatgtgcgcaccatcgcgttgaacacaatgtcggcgacaccccccgcgccttggctgcgcttgagcacggcgaatttatccaaatagggcaccatgcgcgcggcactggcttcgcttccgtcgtctggtacgcccggcggcgtttcccaggtcaggattgcgccgccttcgtactcaccggcgacgatgataccggcgatacggctgttcactcggtcgaggtagttttggacgttgagtttgcggtcaaaggagtcttcgattagggtgactagacgggggagatcaatagaagggtcgttcaatcccagtcgcggttggatctgggctgtccaggggtgtgtgtaggggtttgggaggattgtgagaggcattccacgtttcacaaaggtcgtgtgggagctaactgggttaaatgggctggatccgccattggaagcaccgcgtcgacctgggggtagggaggatgatagtagaggcttgtcggtgaggaggtggtggattaatgggttgcgctgtcgacgggttccaaccgctgacgggtctgaagcggcctcttttggtgaacgcgctgagtaagaaacttcttgtggggaggtaatgatgcctgaagaggcggacggtagcatggctaatgcttgttgggttaatctgagattctccaaatggccatctagcacctcctccatcgcctcggcagctggtgattgagcgggtgcggtaggtggcataggcgagacaacctcgcgattgacgaattttgagaacgggttactctccaagactgggtaagtggcttccgtagttacctgtttcgagggatctttgtggccagaaatagagtttcgtgcctgggaaagctcatcttcaatttgatcaaactcttgctccatgttgatgaagacgtgcgatgattgagggcccttgaaagctgggatgcccccaagcgcatcgagaacaatgacacggtccagagagacctccctttgtagagtattgattctctcggcagttactgctggatcttcgtccgggtctggatttgttgacagtcccgcaaattctttcgtcagtgcaagggtagcatcatcagctgaaactgtcacggctcgtgggttttcctccgtataggcaatgggcggaacaagtacgacatggccatcccgaaggacgctcaagagcatttttcgcgacaacaccgtgggttgaccagatccccgctcggatatagataacgccgagtctagtctgaaagattttgagtccggctgctcatcgattgcccccgatatccgatttgcctgttcaatggatatttgtcgcccggcagggccgcccatcttcccggggtcgacaactacacagcatgccatgcccaggcggacgagctgcgagagggtcttcgccactcccttaatgacagaatcatcgagcaattgtggagtggtgattttgatcagggccaagtgcagcctttcaggtataacctgcgcgcgcggagtaggagttgtatcttgccggaagacagggctatcgtacaccgccctagaagcaccgtagaatgagcccaaattgacaccggagggcagagatcctggtatcggctccttcggaggctcggtagattcttggctcgatttggcggggctggcctttagccgagctaagtacgacctagcttcacgcttagtcgatgcggagctcaggaggctaagaaagaattcctaagccgaacatgccgctgttagcatatgaacagaaagaaaagaagaatagtaatatgccacctacccgatcaagcaatttctcctttgcgcggtggccgaggcgatcttggctttcgctgctacccgagaactcggcgaattgctgggctcggacattcagcgcctgtgccggtcgcgccgtaatggggtcactaggacgaacgagatgttgctgcagacttctagtcaataaatgcttagcattggcggggtataccggttttaattaccttcaccagtgaggacttggccgttcgagaccagttgaacgttcgggaggtcattgttgggtgtatatagttgacgccaatgcaagagcatcggagaaacaacctcaccacaaatcaacagtaaacatataatataggggaacgagtcaagatcaaacaaatctttctgagggaaaagaaaataatatgacgcatcctcggctaggtatagctcaccgcctgtggataccgagattgataagaaaggctgtccacttctgtccacttcagggctataaattgtacatgtctgttctgtacactccatacaaggatattagtggactaggacttaacggaaatagactgcgttttaaatgcagctacctatcctggtacagagtgtataagaaaatctacccactttcgagaaatatataatcaaccataacagctggtggttataaatagcaaaatgatgttacatgttgtacatacagtccaacccttcttaggtttaggtctcttcaagcataaaataaacacaaagatcaaagaaaggaattgaacttttttatactgcctaacaataaatttagaaagaaatacaacctattcgaatcacccacgtcattttcgggaccaaaatgctcgctgatttcgtatagtacttttgatatagctagcactagagtccaccggtgtactatccactcctctatgacctacatataccctaaagggaaccttggaagtatagtcagggtcaagggttctagaagccagtagcccgttttatacgtgtagaccgctttgggcaaaatgtaacagtacgagggggatacatcgtaatctatggcgaatccggcctggaacggggtactgaaaggttcctatactttagcggttgaacctcccccgccactgcaaaagttgctcatcctcgtcatctaaaaaaaagaatacctgcttgaaacacgcctctgaaccaccgaagactcatcaaatattgtcaaatatcaaatccaagtaagtgcgcccgctcctctctcctccccctcttcaaatccaaccccggtcgcaacacccctccttgcaatacagcgcaaatccctatgaattgcccaacatcccctaaggattgctcggaatcactaggaacaatagctgtcaatttactgtggtaattggcactgtctgtttcgactattggtcctatttacctgcttgagattgatccccaccattttagatttacagccctcgtacgccaccacgccgcttacccttcctgcaatccaattgatcgtggcaccctagcctggtctcaccgtcggaaattttgatcccaaccgcctcgaccctcgataccccagtcaagttctttatcctcactatgtccgatcagagcgaatacctctccgactccatgtccggccaggacaacgggctcaggccgttgtctaatgcggacgacttgtctctcggaaaccctaacagcgatttggctcgtatcatgagccgtgctggcattcaattagccaatggatttccagtcgatgacgacgaggacgacgacgaggacgagctggatgaggactattctgccgttgatcaggatgacgacgcaaacgatttcccatactggttccgccgcccaccctcccacaaccgcacaaagctggatgagctgcatccttttgttcaattgctctccatatctaatgtggaagattgtgtgaaagtggaggaagctttccccgagcaggagcgttgctctcccgataaggtatggctacccggattcaattacaccatagagcatcaattcaacattcaaatcatctcacttgatatgaattgatgcgacttcagacggatggagacttcattgctaataatttcatagttccgctaccgtctcagcagatgccccgagctcagcctgggcctcttcactcttcctttgctcgcagaaggagaaacaaaacctcgcccaacgctcgtcggacacatcattgccactcgcacttcagagcccattgtgacagatcggtcgatgcaacttccgaccaactggaaaaacgagcgttggtccattgaggacggacaagctgttggtcacgaagaaggcggtcgcactattgccattcattcgcttgctgtggacccaaagcatcagggcaagcaggtcggaagcacattgatgaagtcatatatccaccgtattagagaggcccagattgctgatcgcatcgcgatcattgtacacgatcacctgatccccttctacgagtcatttggcttcgagtcccatggccctagcaagtgccagttcggtgggggtaattgggtcgatatggtatgttctctttttaactgtcagcaaatatatactgaccctaaatagatcttggagtttggccccgagcctcttgaggagtaggaagtttttcgtgtcgttttttttaaccctctttatttaccctcttctttttctatcttttcggcttggggcatgttaaccactgacgggttcaacccgttcttattacacacatccatgtttttgtctcatctcaagggtttatcctagacgggctttcacaagaaaagcaacggagtttctttgggcgggattacttttatgaatctgggcagaaacggcttgggcttcccgaatcggtcacaagggcatgtgtaccatagttgacgacaatgctattatgaggatgattgtttgattccggccagagatagttatcaacttccaaatatcctatatataaatcctcgaggcatgaaatcgagccctcgatcattttgttccatattgtatcacgtgactcggctatatcccggttcgtccaatcctggtccccgcatttgccttccgcccggcagaaaaaaaggactgccaacaattttttcatggagaaaaacccactctatcaacacccattcactcacggcattacttcaagagtcattatttaatttgactcctgacttgtgcccattatgaagacgacgtggaaggatgtgagtcaatttcccgactgcccttttgcgctagatttgactgagcagagtgctaatgtatttttcaccgcttggtagattgcgcctgtgccgacacaccaggaattcttggatattgtcttgagtcgcactcagagacagcttcccacacagattcgtgctggtttcaagatcagccgtatcagaggtatgatcacattcttttcatctgatccaacatcggcaaaaaaaagttatcgcggttatcgataaagcacaatttctgatcgaattttctttccatcagggttctacaccagaaaggtcaaatatacacaggagactttcggtgaaaagttccagcacatcctcgatggatttcctcgtctgcaggatatccatcctttccgtaagttttactcctatggcgattatggttgctcgggtggggtctaatatccaccagacaaggatttgatgaacactctttatgatgccgaccacttccgtatcgcccttggtcaagtctcgaccgccaagcacctgattgaaaccgtttctcgcgattacgtccgtctcatcaagtatgcacagtctttgttccagtgcaagcagctcaagcgcgctgcactcggtcgcatggcaaccatcacccgccgtctgaaggaccctctcgtctacctggagcaggtccgccagcacttgggtcgtctgccctcgatcgaccccaacactcgtactcttttgatctgtggataccccaacgtcggaaagtcaagcttcctgcgcaatattacccgcgcagacgttgatgttcagccctacgctttcactactaagagtttgttcgttggccatttcgattacaaatacctccgtttccaggccattgatacccccggaattctggaccaccctctggaggagatgaacaccattgaaatgcaatcgatcaccgctgttgctcacttgcggtccgctatcctctacttcatggatctttccgagcagtgtggatattccgtcggcgatcagatcaagcttttccacagcatcaagcccttgtttgccaacaaaattgtgtttattgtcgttaacaagattgatgtgcgtcgtcccgaggacctggagcctgagtaccaggagcagctgcaagagatcctcaaggcagaggatgtcgagatgctgcaggtttcctgcaccaccaccgaaggtgtcaccgccgtcaagaacgctgcctgcgacaagctccttgctgagcgagtctcccagaagctcaagtccggctccaccgctgccacccccggcagccgtctcggcgacgttttgtcccgtatccacgtggctcagcccatgggtggtctgcgtgagaccttcattcccgaggccgtcaaggacctcaagaagtacgacaagaacgaccccaaccgccggagactggaacgcgatatcgaagaggagaacggcggtgccggtgtctacaacttcgacatgcagcgcgactacactcttggcaacgatgagtggaaccacgataagattcccgaggtgtggaagggcaagaacatctacgactttgtggatccggatatcgagagcaagctcgccgccctcgaggaggaagaggagaagctcgaggccgatggctattacgagtccgacgagagcgtggaagacgtcgaagacgccgacaaccgcttgaaggccgatctcatccgcgagaagcgcgtgctgatgcgcaacgaagccaagatgcgcaagtcgctgaagaaccgcgccgccatcccccgcagcgcaaagtccaagaagctgtccgagatgaccagggggctggactccgctggctacgacaatgccgcagctgggtctcgtgcccgtgccgccaaccagcctcgcggccgtgcgtctgtccgtgagcctactgcggaccccgatgccatggacgtcgacgacaacccacacaaggcccttgctcgcgctaagagccgtgcccgcagcacacctgcaactgatcgtcgtctcgacggtgtcaccaccttcaccaaccgtgataaggctgagcgtatggccaagttgggccagaagaagatgaaccgtatggctcgtgctggtgaggctgatcgtcacacaaccgcctctcttgacaagcacttggtatgtttttctatactatcctttttttcgggtttatttgctaactattctctcttcagtacgccggaaagcgtggtatgggcaagacagatcgtcgttagaagccccgctgatgccgatgcggcttcaacgagacccattcttaatcattgtccattggtttcgatgccgggtgcaaaatggtgttgggcgtttaatatttcaaattttttttcccctccgagtttcgtccaaatgttcatttgacgcgcatttttggtttccacgactgtttactgtggatgatttatgtttatttgacacagtaatgatttgtgggagttcgttctcctggtcaataggacgaaaaagttctataacttgatgatcttgcatataccgccaatacagatgatctttggtttcatgtggtacaacacttagactccaatcctagtgtctacatttttaatcagcctttctcgtacggacttataccccaatgtgtaactaagatcacccttgggtagagacagttcgccggtgcttagctagttacatagagcagctggttacgtcctcagaagcattggtccctaggtgcattaaccggtgggctgaaaggctgaaaggctgaaaggttattaatagcaatgttcaccaatcatacgattcttcctatggttgtgatcatttgataaggtagcctagcatttatgtagcacaacttagaaagaaaaataatgttaaggaaagcccgaaagtagtgaaggcacagttgaatcaaactttaagcatgcaacaagcataatgcttattagagggttaatatccattgacatatggggcccccactcttctaggtctagatacatagcatgatagctcgggtgacttttgcaagttgcaagttctctgacaatatcatggtagaacagaacagagcagatcctatgtagtatatggcgaggttaacagcccacccttggatgtccgcaactaaccgagcaccgggttataaacaatgacggcatcggacatgtgctaaactgaacaagatgccttcctgtcataaaggatcggagataagcattgtcgcctgtgcaatggggtagttgcttttcatggggagaggcgggggtggcttatttgggttgtatggcatgctatacagaagtacaacatatacggaatactccgttatagttatattgtatatagtgtagacgtcattatggttgtgtctcagaagattagacaaggctgaccaatatttgttcattgaacttgatttatccaaatgttcctaatatggcatggggtaaagatctactgtcaggcaaactctaaatccttgccctaggttgttaaatcaaacagcattaggtataatatactcagtaagatgatttgttgtgtttagataaagaccccagaatacttcaactcactatatgttcattatgccacgtataacatacacaaagcctgcggggctggtcaggtttgccccggaaatcggtccaatctagggttacatgcgaaaaagtcagctcacacagacataaggctggattgagtttatttcctagtcggagactaactaaaggaggtttagggtgtccacaaagtttttttctgttttcacaatggcctgataccggtcagagtttttttctaggggattttcattttaggtctaggccgaacaagggatgccgcgaaagacgatgacgaacataccgaaaggcgaatatcatagggaaaacggaatcatgctacggactacggagtactccgtagggctttaagtattgtattcatgaagatccatgaagtatctataatgttccaatccatatatatggtacatatcttttggtacacggtacatgtgtgttttcggctatgccgactcgggattccactcggctcggcagagaaaggacattcggtgtgccgattgagaagaagtggatacaagatcaacacagcggaaacatctcataggagtcggctcggccgaagccttaacggtagtggttttataggtagtcttttccgtgcccagcttggatttcgtcttattagcatgtttcgattcactaggatttgttcagggatacataagtaatgggactatctatctttgtgtgtagagcatctttgtttttcgtttgactttcctaattgagctatcaaatgcaatcagatattctagagctctcaattttaactatgatcagcgcccctatgcccggctagggagcagagtctacgtattatgacccactcgtaccttggtattactatttctttcttgtttgtttttttcggttttcgccttctcttttagggaatctatccggtttcagtcgcctttgtttccgtctatctatcatgccagcacagtttctaatctatccataccccggtcgtagaccctgtgaacacggcactagaacccgaggtgaaggcgaccacctggacatatacgtcactctaatagaagtgagttattatttttacattgtcgccaggaactagaaccagaaccagaagtatcatggtcactcttacgtatcgatatctggcactcggcctaggcaccgcattctcattcgcgcatttgcaccgaggacccagtatacctgactgaatcccgtatgtttctagaaggtggtgagaaggtcgggtgatcttttagtttttatgctcacacgttactgtttattgtttgatgtaagtgtttacattgtatggcctgtctgttccaaggttgcatagcctctgactatatcatgaatgcaatcaatttttagaacaaagtcatacaacatctacatgaatacgttttcagctcacgtgcattccaggtaccctaacattcccccgtcctccaccttctccaccataagaaaaaagaggaacctaaacccggagtatatggcgctagacattgaaaaggccaagaccttttagacccatggagtaaaattcataaccttataaaccccatttcacccatctcatgttcaaaaaactcattggacagtacaaactaagatccgcgcgcccccgtcttttgccggtcatagtactctacacatacggagtacccacggtaaccccaagggaaagggccacccccaagacttcccccagaaactatttagtgcctcctcttcctttctcttcgcctttttcctcttcagcttctttctatcatccccgtctgtctgttcatcatgggtgtctctaccttcatggataagatcaagcatgggaaggccgaatcccaggtctcctcccaggccagtcctgctcgtgccgactcgaccactgctgagaaggacaacctcaccctcgatgatagccccgtcaagtacctgacctggcggtctttcatcctcggtctgtgtgtctccatgggtggtttcattttcggatattctactggtaagtgtcacacagccctcaccactgtggatgcaacgttaataatagccgaacctcaggtcaaatctcgggtttcacgaccatgatcgatttcaaacagcgcttcgccgagtacaatgccgccactggagaatatgctttcagtaacgttcgcaacggtctgatcgtcggcctggtacgttcgagatgtcaatggattcccgcatgcaagtcttactcatactaactctatactagctctctatcggaactatgattggtgccctggtagctgctcccattgcagaccgcattggccgcaagtactccatctccttctgggccctcgtccacatcgtcggtatcattgtgcagattgccaccattgataaatggtaccaaatcgctctcggccgttgggttgctggtctgggtgtcggtgcgctttccagtgtcgtccccatgtaccagtctgagtctgcccctcgccaggtccgtggtgcgatggtcagtgctttccagctgttcgttgccttcggtatcttcatctcctacattgtcaacttcggcaccgagaccctcaagagcgacgcctcatggcgcatcaccatgggcattggcttcgcctggcccttgattcttgccatcggtaccctcttcttgcctgagtctcctcgttacgcctatggccacggtcgtgtcgaagaggcccgcgatgttatgtgcaagctctacggtgtcccccacaaccaccgtgtcgttgcccaggagatggccgatatgaagctaaagcatgaggaggagcttgcccacggcaaggctcactggcaagaggtcttcactggtccccgcatgatgcaccgtatcttgctcggtgttggtctgcagtctctgcaacagttgaccggtgccaacttcatcttctactatggaaccagtatcttccagggtattggtctgagcaactcttacgtcacctccatcattctcggtgccgtcaacttcggtatgaccctgcccggtctgtacatcgtcgaacactatggtcgccgcaagtgtctgatgtacggtgcggcttggatgtttgtctgtttcatgatctgggcctccgtcggccacgagatcctggtccaaaccccctcctcccaccccgccggtgttgccatgattgtcttcacctgcttcttcattgtgggcttcgccaccacctggggtcctatcgtttgggctatctgtggtgaaatgtaccccttcaagtaccgcgccgtctgcatgggtattgctaccgctgccaactggacctggaatttcttgatctccttcttcaccccgttcatctccaacactatcgacttccgctatggctacgtcttcgccgcctgctgcttcttagcggttatcgttgtcttccttttcgtcaatgagacccagggccggactctcgaagaggtcgacaccatgtacatcctccacgtcaagccctggaagtccgctggctgggttccccccgagggcatcgttgccgacctgcacggaccttctaccgaggcccccaaggacggtgaggccggtactagtgagcaccagcatcacgacggcgagcctcaggaggttgctgagaaataatgcgataatggctgaaatgatagcgtgtatcgcgcggcgcttgcgtggatgctttttcacaaaattctgtgttcatacttaactctactccgggatcatttgagtctccaccatattcctagggagaccatgatttaatagctacaagccaggcttgttttagcaatctcattttcttatcaaattaattcaaatcagctgtaagacacgcaactagatctaattctcacattaacttcattgattcccgaattccatcccagctccctttctagccgccccgtaaacagcagcaacatctcccttgtcccccctaacctccttaacgacctctagaagcccatccataacctcgacgtttttcatcctcagtcctccctccttcgcaatcccataagcatgtctcagatccttcctagcaagatcaactgcaaagagcggctcgtcccgggtacaataatccccgcccaccatcctctgcgcataattagcaaacgggcccggcgcaaaaagcccaagccattcttgcagcggctcaactcccagcccagacgcctcagcggcaacaagggcctcagcaagaacaccaaccgtattgagaatgaacgtgttaccgagtaatttcagcgtcgacgcccgtccaacatctatatcacctcccctcccagacgaaagatcaatcgtcttcttagacacgacaccgtcgaaaaacggtcgcactttctcaattgccgcacgcttcccagccggaacgacgataagctgtcccgcatctgccatattcggtgccccgaagaccggacacgcgacgaaccccgctccccgctcattgaaggcggcctcggtttgtcgcgatgtatccgggtgcacggtcgagcaatcgatgaagatcttgtcggacaggtcttgcgggattgtagggtccgataggattgccgtgacgattgagtccagggcggcgtcgtcgccgacgcaggtgaagatcaggtcggattggtttactgcttccgggagggtagttacggctttggcgtttgggagtttcgaggcgtgggcggttgctcgtgcggttgtgcggttgtagaggaggagggggccggtttggggtcctttttcggcgatgttttggctcatgccctgcgattgcggattagatgaggttgctttttggttgcggtgcggattggcttactcggccgatgttgccgagacctatccatgcgactcgaggccctgccattattgcgtagtaggtatagatggatgtgtatagaaagactgtaagtgtaagagtgttcggggtgttcggggaagtatcggggccttatacgggtgggatgtggggtgtggggtaaagtggctcatggctcagttcttagccgattgtcgggcgacaatatatacgaagtatccagtaggctaaagggttgattgcatggtaattcgccatggcttgcctgtacttattcctccatgttcgaatactgcattcgcttttcaagggttcagttgtgacatacaaaaacgtgtaatgtggccaagagctgccctagaaaaacagattgagaaaagcatatagaattagagaaaaatcgatacgactcgatattcgcaaaacataatatccaacctaaagcctcgacttctcagcaatcgcaatatcctgaaacggcaacccgagatacatccacatgaaggcaaacctatatcaatcagcatcccatacatcgcataaagaccatataaaacctaccgatcactaccaaaaaacggctccccttttccttcggaatttcgcacccaaaaccacggggcgccataagcccccttatcaagagcaatctgcgtattagccgtcaaagcctgcttgatctccgggcttgatgccgcagccagaatctccctgacttccgaatcagagtacccattgctctggagtagctcggttaggttttctggcttgctgatgtcgatacccttgtagtacatccactcccacagcgacaggaaggttgtttcgtacttctcgcgtgggaagtggttttttatgtagatcatgcatcgttggggctggctggttagtggctgagaacatttcgaagatatagagaggattatataccaggattgacaggattgggaagaactctggtgtttggatctgcggaactccaaagtatttacatgctcgctccgagtcgaatttggaatacgttgctttggcggggagtgaccaggggggtttattccctattcaaagtgtcagtaaccctggtctgaatattaatcacgaatgaaattctcgatctatactgcgtacctgagccaacattgatcccgcctagaaagaccgggtggaatctgttccatcaacacacatacatccaatgtattaactagggatttgcatactcaacctcaaccccatgtgactctagaaccttacggttccttcgtagataaagcgtcgcatagtatgagtatggcgatactgtccaagcggcaataaacaattaggaatgaaatctcagggggtggagctgaaggcgtaccgcagtcaatgtaggcatcaatcttgccagacatgagtaattatagtcgatatgtttctattcaatctcagtataatcaatcaggctaccaacgaagaggagttgattatagcgtggaggtcggggccgaggtggagatggaccgaggctgcccgacgatgatgaggtgatcatcttatttcccaaattgtcatgaatcgtcaagttctatattgaattaaatccaagatatataattgccatatagattttattcttttctcaagatactgagattggggccgccccaatcaccattgcgttggtttggtggattttcagctcttcctttgactgctcgacagccaaaagcaaacgcgtggagcgaatgtgaagttctatcaagtcaatacaggatcctctcaattggaccatgaactgaccttgcaaaataacctcatatccatcccaagagtgatcatcccgatcatcttcatgtatgagcactggaaaagatggatcccacgcctttggccgcacgcgcattttcaacccaacggtcttgctcatatccacccacagtatatcgtcagaagtcattcgctctttttcaaagccaccttccccgtcggtctcggtagttttcttcgttctcctactttggccacgcaaccactctctccataaccgaataataccatcctcaatagtcgatgcactcaacagcaacgacgttcctggcttgacttgcactagattgaccaccacacataactgtgagaaattctcatatccacctaaagtgatctcacgtatcactgcatcctctgccttgtcttctcgacctccatatcagcccatgtaaaccccaccatatccaacagcagaagcacctacctgtggaaaaaccggacttcgaaccatttatgcttcgttctttttcttctttatcgctgcttacctctgggcgaaagcgcgagtatagccccgtcactctgcctggctggtgggtggcatcatgaccctcgctcagtccattcgtaccaaggtattgacagaagacgtggggctcggtgagttttgagctaggatggaagcattccagcagcagtttgaattccttgagtggtatgctaaggagcaggcggtagtgcaggattcttgaaaccagcgcatagaatcggtggttgactgatatgagtgggagaagtgcccgtgttgagaagtcggataggatttggatgaatacctagatatctctttaggaccgtatctcagagtatgttctgtgtacatacttcgttgggcagcgagtccaaggtcatcacgggtttagcggggttcatagtggttgattattgtgtcaattgagatgcaacctgggaagatagaccaatttatgctagttgtatactccaaggtgtaatacaacagaacagagacaacaagtgtatgtgagttgcactattgctgttggtcttgctgtacatcgacatagagacgataagggataagggataagtgacgtcatatcacgggaggcgggcatgaatttccttttccggctttttggtgtgccagtccactacagtccactaccgtccactgctaacccactgctaacccacatacaagcatcctatgtgggacacgacccggggattgtgatcttcacggttagttgcggtaccaaattgcctctttcggctcaatttgggtcaaacagtccccccgaacgtgcctggttccccgaaaactggggggatcccgatttctgtacgggtcaccgaggaaaaatgatgccaaggcgttgtatgctagtatatattgtttctaaaacttcgcgataccattagcacattaggcgagatccacgtgtggcctcctatacacaatacttggcctaacacattcattcctactccggacaccccgcctcctcattagaagtccaaccccgaccctttcaactgttttcgggcatttctctttccttttagtttcttcttctctcccctccaatattcttgttttcaacctacaaccatggacaacgtactcaacgacatctcccaccggagatataaccccctccgtggctcctctatcctggtctccccacaccgaaccaagcgtccctggcagtgagtattgttttcagaaagcgacatttcccaacaaatcagctaatcgtacaacaatccagaggagcacaggagagcccctccaagactaccctacctagttacgaccccaaatgctacctctgtcccgggaatgagcgcgcccagggcgataccaaccccaattatgagagcactttcgtattcgtgaacgactacagcgcagtgaaggaagaacaagcggcctataatccctcaaaccaggatggtacgcccaaccgcccagcgcatccgtaccacacgtatcaagctcacaaaccacagaactcgaatcgcgatttctcaaagccgagcccgtaaccggcaagtgctacgtgctcactttctcatccgcgcacaacctcaccctcgccgacctggcgcctcgagagatcatgcctgtgatcaacgcctggacagagatctacgcagcacacctgtccccggcctcgccgttagcgaagaacgcacccgtaacaacgctaccgcccacatccaccttaacaagcgcgacgaagccaaaggagcagtaccggtacatgcaaatcttcgaaaataagggcgaggcgatggggtgctcgaacccgcacccacatgggcaagtctggacaaccagctcaatgccggaagagcccgccgccgaaatgaatcagatgattaagtaccgccagcaacacggcggtagccacctgctggaggactatgcggcgctggagagccgcaaacaggagcgcgttgtgtttgagaacgaggcatttatagttgtctgtccatggtgggcgacgtggccgtttgagacgatgattatcagtcgcacgcacaaacgcgcactagtggatttgtccgaggccgataagatgctgcttgctgaggcgatcgccgagactacccgtcgctatgataatctcttcgagacgcacttcccttacagtatgggtattcaccaggctccgcttgatggtaccgaggaggagattgagacatcctacctgcacttgcatttctatccgcccctgctacgaagcgctaccgtgcgcaagttcttggttggctatgagcttatggcggagcctcaacgtgatattactcctgagcaagctgctgataagctgcgggcttgcagcggtgagttgtacaggaagaagatcgattcgtgaatgtctctgaattgaaaaagaaaaaaaaatgatgaattctggacgggtcataccagagttaaacctatttcatcctatatctatatgcaaattatattattttacccgccaaggcttttgtgccggatgtaagttatgttatacatagttgtggtccaacttgcaatgctcgttcctgtatagctatcggttccgtgttgcattgcattgaaccatcccctgaagccggatcatcccctcttccaaatcaggcacttaacccaggtacgctccgcgctgggtgaacatccaagccagcgaacccgacgcaacaatcaaaggattcaagaaccggcccttgagcgaggcattgccgaggacgagctcgccaacaaagtgagacagcgcaatgccgtacgtccacatgccaaggttgtacgcgacagggttcgtgatgttgtaagcagcagtcatacgaatgactgcagagaggaaggtccaggttccgaagatgcggccggagagcggagttgcgggaaccgtgccattgctgtagagtagagaggtgtaattcggtgcaatgtaggcttgcaggctgttaagagcggaaacgaccgagacctgtatagagagtggtggttagattgggggaatagaggcatcggtagctaggggttcggagtggcagtggtaatggggactggggtggacacgggtagaacttacgaaaaagagccatttgggcaggaggccctcggactgaggcagataggctaagtattggtccatttctgagcgtgagtttgtctttttgtttggtttgaagggagttggttgtttttcttgtgactcgaggagacgccgaggatgttccgggagtcttggcgtggatattcccaacaagcctcgcattagtttgctcaactttttctttttcttctgtcaactttttgctattcacatatcttcgctcattatggatatctcgaagcatattgaatgcctgtctcaatggccagcccatattgccccgggcttacctacttatggagcgctgtttctcctagcgactggtggactggtcattgcctgcaaggtctggacgttcgtgcgggtgcttctcagcctattcgtgcttccgggtaaaccggtatgaaatttgatattcagatcctgaaattaacgggatgaagctgactaggatgatcaaatagcttcgttcgttcggtccccccggtagctgggccgtggtgacaggcgcctcagacggcctgggcaaggaattcgcgctgcaattggccaagtcgaaattcaacgttgtgctcgtatcccgaacagcctcgaagctggcaaccctgtcagaggatatcagcaagcagttcccgcaggtgcagaccaagacactcgccatggatttctcacgcaacgccgatgccgactaccaggcgctgggcgaacttgtctccgatctggatgtgtccgtgctagtcaacaacgtcggcttgagccattctatccccgttccgttcgcccagacccccgccgcagagatggccgatatcgtgaccatcaactgcaccggcacgctgcgcgtcactcaacttgtcgttccgggcatgatacagcgccgccgcggtcttattctgactatgggctctttcggtggtctcctacctactccgttcctcgccacttactctggtagcaaggctttccttcagcactggtctactgctcttggcggcgagttggccccctacggaattgatgtggagcttgtccaggcctacctgattacctctgccatgtccaagatccgtcgtgcttcagcttctatccctacccctcgtgctttcgttcgctccgttctgtcgaagattggtcgtagtggtggttcgcctacctacgcttatagctcgtcaccatactggagccatggtattatggcctggttcctgacttgtgtttctgggactatgggcaagcttgttctcgggcagaacaagtctatgcacgagagcattcgcaagcgcgctctccgcaaggctgagcgtgagaatgctaagaagagcacttgagttgcttggcttggtttgctcgatttgctgttgttgtggagtataaggagcatactacgagtgatgcttcccttctcgggcgtgattaatttattattcgaaatgcatgatgggttcgacgaagtgtataaacagaaaaatgataatcagcgctcatgtgaaatttattgatacctaacggtcatcgtatcctataccaagaaaatgaaagctaaactccgtccccgatgatatcgtagaattcttatcgataagctcttatcaccccgtggacaatcatccatgacgaccagctagaaactgcgcatgttacaatcaaactaacctgacgcatataagtttatatccagactcatcatgtctcaatcaacccacttcatcagtggcatcgaagacgcctcatacaaaaatcccatggaattaaaaacaccgatctgtgacaatcgcattcatctcctccttgccgcaaccggctcagtcgcgactatcaaaatagccaatatcatcagcgccctttccccgcatatccacaagctctcaataagagtaatcctcaccaccaaagccaagcaattcctcgccggccagtccgccgagcagcccaccgcctcgtccctcatttttctccctggcgtggaagccgtgtacgatgatgacgctgagtggggaccagagccctggcgccgaggcgttgatatcttgcacatatctctccgacgctgggcagatatccttgtcattgctcctctttccgcaaacacactagctaagctcgccaacggactaagcgataacctgttgacatcggtatgtcgggcgtgggataccgatggccaggttgacggaaaaagaaagcgaatagtagttgcgccggccatgaatacggctatgtggcggcacccagtgacggcccagcatatcggggtgctagaggaggagtggggggttaataaagacgaggacaggggagaggaaacaggctggttcgaggttctacacccgcagccgtcgaaggtgttagcttgtggggatgtggggagtggcgcgatgttggaatggactgagatagtgaaggttattgaagataggttagggttgggggatcagaactcatctcagagtagttaggatatgtctttgccattcctctatattcgcatttatcctccaggtagcatacttccggcgtagcggacattcccaagtcatcttcttggattatttatggcatctattagaatttttccacaccaagaaacctatatcagtaactttctctgacatcctcgataatctatcgtgggtttactccaatgatgttgggcatcagttcttatgcttggatgtatttttctagctcccgatgttcactgtttgccccctatgctcgtttagaatcttgcacaagacttcttgatcactttcccctttcaaatccaattgaacccactgtgtaaatttcacttgtgtcggctttacaatatcgtgaaaagagtggggtcccatctcacaaccaggtgagtgaaccaattctgagagctggaccatatatagaccccaaataggcgattgattggcgagttgtaagagaacatgcaaattggactgtataaggcggttaaagtcgggtatcagaaggtttgattgagattcgtgggagcccaatagataatgaggaagagagctgattaaaacataatcacgatggtgttttccgtcttggtgtcctgcttcctcttggtgtttttggtcccttggttggcttgtgatctcgcccttgctgtctgtataggccttgatcgccgatggtggcggaactgccggcaaccccactagttctgcggtatacacgatgataaacggaagaaaaaagtcactgaatgcatctccggttttagggagctcatatataggtgtgcagatacgtaagcgccgtcgatcgtgatactggtaatgcaaagcaagtccacgccattcatcaaagtcatttagacaaggcgcagggttatccgataggggctgcgatggccgacacccataggagcataatgactcaaatgttcttgcttgatcgacttcattaatgacaatctcgatattctggctgtctgttagatagacctttgctaacattcttagagctctggataacataccaatggacaaagtccccccccccacataacagccgtttactccccagagcgccgaagagattccggcgtcttctaatagttccacaagtcttgcaatgtcatctatgcctgggccttgcacggatgtaaggaaatcattctcgagagtcatgatcgggcctttcaaacgtggcaacgtggcaagggggcgccagattgtacgggtgcgaaggtgcagaggtcggattattgaatgagaatgtaatatattgtcgttgaatatttcagactgctttcgacaccgctctatgataatgtaccctaaatgatactagttacatggttacagtcggaccgcaaaagtctccactaggatagaaggatgattacggagtactacggtctgtattgtccctatggttgttggctgacccccctgagtggttatactgtatgctcaatggtaactctatagtatttgaactaggatttttttcaagtacaaaagccacataatagtagtatcaaaatccttcaaaaatgtagtataaaagacaccgaaaaagacatacataatagtaatgaaagagaataaaccaaattgattcagtcagtaacagcacgttctataaaccctgcagttccttcggttgcaaacagatctaaagcaatacatccactatcaatcatgggccatgaccaggtccttttgtcctattacattaccatttgcaaatgcactgaaatgtatcacccgatcggtcattgacacagatacctggatcaaaagctccaagtaatagacggtatgtccggcgatggttcggtgaggaaacgaggcaaggtcaaggtgatcgaagtgacattgaatataatcgatgcaatgagcatctataatgaacttctctcagcattcccaatcactgcttataaagatatgcatatgttttgtggttgaaaacattggacttaccggagttttcaaaccgctctggtgcatctgagagattggactcataaatctccacgggtttggtaagaagatcatgctcccaatgaagtacctggatgctatgggtggactgaaatccctttgggtagttctggtcctttttttttggaaacgatctgtcagatcgtacagggtggttgcggacacttggataatacacaccttgcgtaacacccaacaggggagcaaattcaccgatagtgcgctaggcccatatcccaggaattgcggttcattggggtgggagaaactttgaaacgatgcgaggccgtaatttcgccagcacttgtaggtcggaagagagtagccccgaaggccttggactgctgccccacgagcgatagcctcctccctttgatatacatgttagacttctcgctaactttgtagcatccaaaagatattttcgctcacgggttctcaggaataagcacggaaatgccgatgcgattgagggcagatcctaggctttcctgcagataggatgaggcgctgaatccgccaaccaagacaactttttatagaagatgataatgttagtttcataagtaccccacaaagcaaggataaaagagacgctcactttgatgacatgccgtccacacttctcatttgcagcagtgatctgggacagaatcaagtcgaaaatatttctcagaacaggctcgtataggtctcggacatcttcggcttgaagaacaacacgtcctcgtctttggctgggagactgggaattcaagttgaaatcaaagtgccaagactgactcgttgcactattgaaatgagtcttgatcctttcaaactttttcatggcgcggctccctggtcggatctcgctcagggatagggaatcgaatcccccttcaactctagtggacagtagttcatagaatcgactgtcaatagcagtcccaccacagttagcccctgttgcgtattagtgctcagtccgtgttaattaaatcttgtgtataacttacccataacggtggtgatctgctcaagggagattgtcggatcaacgtctgtgacatagtatgttgtgatatcctaatcacagtgtaagattatgaagtttcaacggtataatcgggtatctcaccactgtaccacctccacagtcacagatcagaattccatcacgaggctaagggttgaatggataagatgtttagctaaacgaaccgaagacaccgagttgagaatttttacttaccttgaaactgacccttttgtcactgaaaacagcaagagctgcagcctctggttccggtatggtccacactcgatgttgaggcctttttccaaagccggctccttggattgcttgacgcatgaggttctgcgtgtcttcggaccagctggccggcgtcgtgaaccagaaatcgatcggcactccacttagatccagttcggcggagatatagctctggatgtgtgtgtagatctgagaaagataatcttgcacagtgtccacggcttccttctggtcaggcagctccagaatctttgaagcagtggcgatcttcaggaatgtatcgtcgaacttgctgctacttggaaagtttgcgtccaatagcagcttcgtccaggcatatgatcgtacatcttgcgtgacctcaaagccccagagaggggctcctccgtcctgcatatatgaaattagggatggggttttggcctgaccaataatatctggaggccactgcttgataaaatcgatactgtcaatatctgcttgaccgcctgcatgagttgtaaggacatatgcgatttctatttcccaagagaattcgttagtgaaagaaatgaatggtttgttgaaggaaaatgtatttgcttacctgtgaaggtggtaccgtagtccacacccacaacaagcttgtacccatgcttagcttccatactgccttggaatcaagatggattctatctgtgttgcaagtgagcttggaaggacaggttggattgaaactcgacctagaagacccttagtgttatagatttgatcttccgtggctcattcccgatgggctagttccaacgatttccaacgatttccaaggtgatgtttctgtttcagtcgtcttttcaacatgaccatatgtttcattgcatgcaagcactgaagttgatgttaaacagaaccacctaattacaagattgaaggacatattagttctcttggtcatgtcattgggccgcagtttattctacctcaaagcatctggattagttccagagaagaataaagaaatgtgttgtgctaatctcccatggaggcactctgtagtctagtttcttctcattattcgcccctaatttcatctgacctcagaaactgaggtttctttctctaatgcagaatcccgtaaatattctacttctagaggaaaaggtttcagagaaaaataaagaaaaggtgtgtggttagccttacatagaggtattttggtcttttttgattcgttgcccctaattccatctaacctcaacacatagagtttctttatctctcatgtgggtttagtggatctggacggagtgccgtttccaataatttccaaagaagaataaagaaatatgtgtggcgagtcgcttatgtcggtattcgtgaaattcgaaaactcccggttccaggaagtaacaaagaaatgtgtgcgtggccatgtttctcccaaccagaaataaaatggaacattaccatgctgtctctgaaaattattcctcttcctttcttgtattcctcgcctctctctgattacattacttcttctgccatgggcgccactaagtcgaaacagaagaaacagaaatcccaggtaaagatgtgccccttttgttgctatatgtttggcctaacacactctcaaaggaagatactctatctgtggaacaccagcaaaagaaagcaaagatgtctacctgcagagatcccaagtatgactatccccgttatacacataaggaatacctgcgcgaaattcgtgagatgaaatacctgatcgaggcaggtatgttgggctggcccgggccaggaaacaaagatgacatgtttcatacgctcacattcaccgtggatgtccaatcatttgtcattgaacacgcgaaagtcaagcctgaggatgtggaccatctctccgacacccagaaacagaccatcatcagccatctcgcgggatactgcgtgcaagagaagtgggaggtccttatggggctccttccagatctggttcgagagaaagtcctcgaggtatttctcgaaactctgatttacaaagacatctttgagaggtttttcgtgaactttttctggtacttcgacgggaaaatgtctccgacagacgaaggagatgaaacgttcactgcacgtctgaagcatctgtatgaccaattctatgccagtatgtatacaacttcccttccgaaagagagatatgtttcgttgaccatgatctttcattgctacagccaacccacttatggcggcactatggagatccgaaacgaaccgccttgcaaactcgacggatatacgcaaggcatcggacacactacttggaacttaccatctagatcgccgccagtcattcatcggtcaatttgtggataatgctctctccagtgagcctatccggtggctacttaaagagacatcaagcacggaggaggcagaccgtcggcacaaggacctttgccgaatttaccatatggcaatggaaagcgcagcagaattgggaaatatacgaggccacattgacttggaaatgctggcgacgttgcctaggaccttcacctccggtgagaggatgcagtcgcatgaatacaatttactacaggaggatagcaaccttctagatggtcaacggatcttgatggttgtttacccagggatagttcgcagatacatttgtgctcttgagaagtatgtcactgagtacagcaccgcagcatacgttgtggttgaggagcaagctcagtaatgatctcgatggaattggcttgtctgtcagtttgctttttttgtattgtttcttgttcaatatactccgcaccctcctcattatcacagtatgcgagttgataaaaatatttcaaaataaaaaagaatggcgccacccggaatcgaaccggggctaacacagatcattgttgtaccacaatgtgtcgtcataccactagaccatggcacctattagatggagatatggttctctttactgtatatgatctttactgtaattacccacaggggtagttgacgacttaagagataaacactatagttgtgcgtgctgtttccgtagcaattggcaatctcacgatacctatactagcttgccaggctaggctagcaggttgacttgcgtaatgtaagtaggttcatggatatattcatggtgtagaaagtaatgtatgcaacacttctgacagagaaatatatatctccaccccttgggaatatactctgctttgctactacgatgtatattcaattatttctacatgctctcatagctggtagaacaaacaatgttatggatcatattgttaggccaggtcaatatagttagtactgacagcatagttgtaagttagcgagtgacatctgtcgtatttcacgttcttgccgaagcacaagtgaatcgtgatccgcgtggcgtaacacgacaacaacctttaattattccatgttagcacaataatttgatcaccaaaaaagtactacggctgagtaaaggccaatcaataaataggtttaaccaaaaaaaaaaaagaaaaccaaaagccagacggggggctcgaacccccaacccccagattagaagtctgatgcgctgccaattgcgccagcccggcttggaatgtggaaagctctcaataatgtgatcgactttgcctcgcgtttcgagcctagttagcctactacattatcgaagagggggccactgcaacggaggcagtaggggtaccaacaagtcctgcctgcgaaacggggtgaaagcaaagtcattcattgggagtagtaggatgttagagagcagaacaccatggagtaactactagaatggaaggttgaagccaacctgaaggtgtcttcgttgctatctttgccttaggggtagttatccatggatcacatggccgcttagtcatcctgctctggaatcccccgctaatcgtgccaggcgcccaaaacacatacggtatacgcccacgcacagtaataactggttgacagccaaggactcctttctagtatcgaaatcctgtctgaatgtcatgaaagacggtccaaatgcgaccctctcggtagccattaaggtcctattcggtttaaactcggaaaacactctatatcgcgaagcgatatactaagctaagctgctcttaccagttcttatgtctcctataataagaataatcttccagcgcctaggctgaggtgtaacgagattatcaatctcctactccacaataatttgcgggacccggaacttctcgactcgaacataagtcggcatctcaaatgctgaataaaaatcttcattctggtgctcgtactcgatagcactcttcgcgcgatttgtaaagtgccttacgatgacatgttttgtgctttctttgtctactccgggcgcgaaagactcccttctttcaactgatctcccactttctgcttcctcttgtgctgccgatttaagtcgagatgcccagcaggagcccatcgagagggtaagtttggcgcaatctagtcccgactccttaagaagtgaaattgttaacaggatcgggattgttcccagaggctggaggcatagcccacggattcagactacaagcagcaacaatccatctgactcggatattcaacatgttctggtcagggattaagagactgtggcttgtcatgggagctggaatgaccgaacgtgctgcctactataccagcgtcgaactccagttgaaagaacatcggacttgatgattcatagaaaactatgtgcaaaattcagtttttgacaagttcaaaggggatgttgatatatcaatcccctatgattattgatttatatatgacccaaaagggtaattttcccattggactggctatcacggtctacgtctaacccctcttcacggcctctttgcgaccccaatcacacaacatggttgcgccccacgccgacggaaatcggggtgtgtgataagccacccaaggtgaagttgcctatttccatacttcgcgaaataggtctcgaaagcgtaggttatcgtcctagaataggccctcatatgggcacgttcgggagattgctgacgaggtagattgtggtgacgctccatccgagacaaggtcgtatgtggtgaccgtagtacctacaagaccgcagagcaatcgagtatcaaagcaggtcgttctggtattagatgccatggcgaggactgcaagaagcaggattttggaaagtaagatggcttgataacgatgggtgttcagcttaggggaagaaatgaacacaactatgagtgataacatggatggtcatgtgatcatgtgatcatgtggcagctatcactcgctgactttgcccaatctttttttgccatctctaggcatcctgcttcttcctcccttaattgcggagcgaagcgaagcaattaaaaaaaataaccctctcccccccgcctgggaaggggtcccccggaagggcccccggagggaacgcctcgaaaggagatcatgtgaccaggcgctctctctactgggtcgaaaaaaatagaaatccagtcggtgaaaaagtaatcgctgagaaacggcagaatagatccagccggcagaaaaaaaaaaagcaatcatctagtactctgtactctaaccctatccccttaacataagatcctaagatccttaagcagctcaaagatattaaatcaaaggagcatattattagagggggcgactcactctcctatttctgtctagttattaggtggtcaattactacgtccacgggtagccactcatataaaaggtacatataccccatattatgtactcaaccctttggctagttaaaggagaaataagagtatgaatcaagaataaatttatagttgaattgattggctaataaaaaaaatctcggatatcttatatatagaagtgacaaaatctctatagctctaaactattcttgttctggctctctcttttgctccccgtgtatcgtattccaccgacatccatatactccacattagggcgtgccaagctacaacatggctaccgtagtgggtcactcgaatgacgctgatcctggtatgtacctcttttctccgacggcgggggctcgattatttctagactagcaagacgtatcaaataaatctaaagctaaagaaggaacaagaacaaaagcaaagaaaaataaaattccgctcaaaacaaaccggtaagggtaatgttttgattggtgtcagccaggtcattgttcttcggctgtcagattgttgtccgccatccacaggattccgccccacccccatacccacccccatacccacccccatactgtaccctgctaagtttcttctactccactccttcggaccgatctcatgcccggcaccatggtccgtcacatgttttctctgcaatagttagttgatccgctatactaatccgctaccagagtgcttccgcccagaccccatcgcctctacccgcacctgagcccacccggttcaacaataaccctgtctgcttcgccacaatccggtcggtagaacgcaaactgaacattgatgaaccgggccttcgggctaaagttgccttcatgaccagcatccaaactctcgaggaagagacaatggttcggtcgctgcaccctgctctgaagcattgcgattgtgtttcagtagttgagggtggtccggtgaggaaacctctgtggctagtccatgcccgcggcgcccggaatattaacaacacacacgccgctggcagggaaatacatgtcctgccggcacaaattcttccacccgttacacccttgggtctgttgatgcgtcctgtcaatatcaagcgtatttacccccggtcttttctcgaaccccagaaagtcaacttaattcgcgaagcctttccaggttccatcggagcacaaatactcttcactggttggctattgattttgtttccggagaagaagtcgctagaggcatgctgggataagggtgtcccggacgaggtcggtggtttacgggtcggatacatcatagcatcattccatgcgacagctaacatcgtcgagtccggtcgagcggttagcagtgcgccaggaacccttgctcagcaggcggcactcggcctacgattacggctcccaggtggccaggaggcaatcacgacagtgacgcatgcgtttgtccgtcttgccgattccagaatgtcaaaaataaggaaacgtttcacggagtatatcttgacagcgaaagattacctcaagcggatgagaccaccgccgcggcagacaccacaggctgccattgtccacccgaaacaggttgcgaactcgccagttggtaaacaagtatggttgagcggaacagacacctgtgtatctataatctttcctttggtgtgccagggtacataatgtgaacataactaacctcactagattggcactattacagtaacttacgaccgatgtacgcgccaccgtatgattccatatccctatggatttcaacacgatttgagtttggtcactgggccgaacctcccccagctcacgaatccccccaacaccccccgggtgacagaatggggtccatatgaagcggcgcttcaaggccggccagtttttgtgcaccgctacaatattgcaaccggaagcttatttacttaccaaggccatggagtaacaacacaagcccagcagtgtattatccatgggacccagtacagctgggatgcacgggcgtttggtacagctttgctatggaggactcctcgagacacagatagcgttcaagggacatcaagcagtgtcctatgcttaggcgaaccacagcacaagacagctagagctcttctcttccagaacttcgaggcacccctaacggcgagtgaaagtgtgcatatcgatgagaacgaggagggccctgtctttaaaggggggtttcttttgcccgaagagatccgtcgctcacatatcattaccgtgggagaaatatatccagaagacttccgtaccccgcagaaaagttctagctcggaggtccctacgcaggaatatggtatgactgtgtaggcatgtttgagaggagagctgttccggtagatagggaaaggtttgctagcggagagtacgaatatgggcggaaggatagagattgacttgcttgaggacatcattatcatcatcatgatcctttacttttccatcggattcaatggtatattccaaagggtatttaaagctatatatgtattactgtcgtttttgcgcaaatctaaaccttgcatgttgatatatctagtgtccgaggtgcccagaaagagaacttcgatgcattaatggaataaatttcgtttagtctcctgggttgaatattgtacctggtctcccccgaatccataggcaaggcatcgagtacaagtagtgcttagctcagctcgatcttcactttctcctgccacgttaattgtgtggctggctgtgataagaaagattcgtattctgggtcttgctttgataggcccgatctctaagttgtttcgttctgtgcgtagctacaggtaaaaatctacttgcggtgaatggcgcatgttgagcatcctaggttggttatcccttgagcatcgcttggtcttgtgtaaaacgtccacaccgcaatttttgagcagcttggtatagatgttacgttatggcttcctgaagcatactgaagtaagaggtgctcttgaaccacagtcgtaaactaatgtagatcacagatgatctgggttagactatgatatttgagggctttcggcgcctttataccttacattcctcatccatacaagtcaagtgggcgccaataatatatttaattagattaagaaactcgagctacctactgtatatagaatatatgtccctgggctcacacccaaaaatttgcggctggatcctttatgtaacagcatacatgcaacaagaattcaggccacgtaattcgaataatgcgcatgatctgttttttttttttttttcgtaaccgaatgcggatctagaaacaagcttccacccaataaaattccctccaaccgaacccccacgcagatgatatccttcacactgctagatctgatacaagcgggatgccaggtgggccgatcattgagatctattgagtagtagtgcatatctaatctatttagaaaccaaactacttggcttccatgtctctcttaggagctgtccctcgatgaaagtagttctagttttcccgcagcttgctcagccagccacggtgttcatataattgcatagcagccactggtatccaactcactctagtgcctcactttgacctttataggcagagagccttcgcacaaagacgaacataatatatagttaatcagattacatgaactaatcgggcaatgaatcaaactccttaactaatgatcttcatcgtacttaccaaccgcggtagccaataccagacatggctagtcagatagcacagggtggcaagttggatcacaaaatattagtcacacttcaccgatctctcatgcgagtctggaccagcccaacctccgttttgcttttcagcatcgacttttcgttctgaaactagattcggatccaggccgacatctcttgagattggtgaattgccacaggcctctaacattgcggtgagtttctgtctgactctgtattatgttttgaaagccggctgtagacaaggtggcaggtgatgggcaatgccagccgtgcatgctctaggacatgagatattgttcgcatagtccgcatgcattcagcatgtagtggtacatcctatcttactgtgctcttttaatgatttattggtagcatttaacacatcatataaacaaatgactaagcgagccttttggctaatataaaagtcacatcggtccctcagcaaaagcatcattgaaacaataattgtcccagcctccgaaccccttgaattactttcattgcagtgtgcctcctcgtttgccaggattccaacaaagactcggaaattaaaatgtacaagcagtggatcacgattcatcttatcaatagcatgcattcgggccacgtgtatgtcaagcatgccatcctggaatagtgagtaaatagtcgctttacagcgcttgtcaaattatattatcatcttctctgacagaatataagtggccgattccaccggaatggagacaggaatgatgagatttcgactgaaatgatcgaccaaacccaagtggctccaggtagttccgtcaatataaactcatgcggtaacccggccgaagcttcgggaacggagggaagcattgagttgtatgacggctataccaggattgccaaagtccattggctctgccacctgggtaaccattccagtgaatttggcatctcagagctgaacgaccattactggatcaagtctggagcatgggacgcggactcggcaattggcttccttgatgttcaagttggaaggaaggactgaagcaatccgcttactcggtcagacaaagggaaaggtatattctctttttcagtgccatctcagctggtatattttgtgttagggctagccactagcgtatcctgaaatggaggtttcgaactagagtggaaatccccaagatggctcatgtaattgagtagactaatcgctaaggttctaatcccatgtgcgcggtgtgtgtataccctggcgcttacttagcgagtacgtcgagccatacaggccaggccagttgtgcaggtgaccctcggggccgtaacactctcccaagtccccaaagctgtcctgtttgcaaaatgtcgctttcttcgtgggtcgatttttggaaatgcgttggtgttcatgctgagagttcttcgccatcatctcaactggaccaaagccctagctctgttgaacgcaacatggaagggtcttcacgtatcgacctaagatatagtgacggaaaaacggtggtaaggcgagtgtatatgtggcagaaaaatctcaataaattctctaactctctaaaactgacaatagtcctaaaacatgacaatctgatggacaacttagtaatcaaaacaaacaaaacaaaagaaagggtgtttttcgggcgaaaaaccagcctgttcctaacgtaaaggaattccaaaaagatgcagcagatgtaatctgatcatccaaggtgtgatcagggtcgccacattctcactctcagtcgattagatgcgtccctgctctctgaggatccagactgggacgacgtgctgcactttccaatcatcgactgaattgaggccatcatgagcgaggccatgtgagctgccattaaagaagatggatcctccgtggtagagttcttcggttcgatggcttttcgggggaccgctataattttcgaaaccggatgcgtttcatccaagcaagatgcaccatttcggagacagaaattgcagacatcatagtccccaccctggcaaagctcacagtggtaaaactcgtccccactgcagatgtttacccggcaaatgtcacagaatttgggcgaggccatttgatggacagtctctggtaccggcaagtcatgatccacctcatccgggtctaatagaccacagatgtgtggttggcttcgctcggaagcttccgagaaggcagtgcgcccaaagcgatcttggaggtgtttattcacattggtgattttcaacaaaatctgagtggcctctaatgcccctgatgctgccactgtcatcagtggagtacgaccatacacggtggctaggttcggattggcaccgttgcaagccaggatatcgatcatatctgtctttcttttcatttgggctggggagggtgacgagccacctcttctaagagaggctaggaagaggggtgtctcgccgagatcgttttgtgtgtccgggtttgcgccgtggcgtaaaaatattctcgcgtaatcctcatttggggcaaaggcggctctggccagacatgtccttccattttcatctttgagatcaatgttttgaccatgagagatgagcagtctcagcatagcctccatatcattcccaactgtctcatcaccgtcaaagtcagacttcccgtcaacctggactgtggacaccacagaaaagatgtcattcttgttgaatgccttttgcttgagattatatgaggatcgcctgactgttaaactgcttttgaccctcttagtgaggaaaggtctgatcaaccaaaagagaggggattggttcaaattgttctcgttgatcagcctggcttctcgcttcaggagcatgtttgcaattgcctcgtaattctgagctacggcccaggaaagagcactttcaccggccttattcgcgaaatttggatttgccccatacttcagcagtagctcaaccatgaaatcgtcaccgttgagagtggagaacaacaaaggtgttcggctgttctgttcaaggcagttgggatttgcgcctgctcgcagcaacaattcaacggctggtgtattcccaagttgcacagcccacaagagcggagtccggcctgtattgtcttcagcttccgtttgacaccctttctgtagaaggagttccacaaggtcattgtgcccttcaatggacgccaaagtcaagctggtttttcccgtttcatcgcgatgatggaggtcaaagcctgcatcgatgagatgatgacacaggttaattcgcccacatcttgaagacacaagcagagcaaaatccccaacacgagttgttgacgtgaggtaagacagcgaatggcgttgaagaactgagataatagccaggtttcccatctccactgccgacaaaaacgctagctttccaacggttccgcgttctccaggcttgatattctgaacatatacctggaggtctgacttataaatgaggtcagctaccttgttgtgtttgaaatcagctgccttgtacaacagaggctccgaagaaggagcgtccatatcatcaagccctagatcaaccaaccgccgggaaagatcagtgcagcccgcacgtacagaccagaccagtggagtcactagaccatctttccaagaacgtctcgccgaccaagaatttttccactttgaatatccctccccatttctccccgaaatatgctcacaaaacaaagcaaagagatcttttgaaagtctcttggacttggaccaagattcttggacttgttggaacttttctgggtccgattccgaccattgactcaccaagtccccgtctccaactgcgtcaaataagatatgagggtatcctaaatcgggagttggattgggatcagccccatttgctataagcaattcaatgatggcggcatattccatgcaagactctttgtcagcacaaaggaatgtagctgcctgaagtaatggcgtctctcttaatttgttcctcgggtccgcgtgagccccaccgttcagtaaaaggtggaccgacgacagagatcctgctctggctgcgaagaaaagcggagtctcttccaactcattcctttgattcggatcacttcctcttgtgattagatcggctgcaagtgagttggatgggcattggacggcataaaagagagctgtgtttccaacaatgttttggctgtcgagcttagcaccttcgctcaacaaaagtcttgatatctggatgcgcctcgcttttatggcaaagaacaacggtgtttcgtttactttgtttgacaaattgacgtcggcaccacgctcaagaagatatctcacaacctcttcatgatcgttccctgcggcactgcacagagggggatcctccagggagccgcttggttggttggggtctgcccctttgagtatgagagcttgaacaattttcagatatccctttgacactgcccggtccaatggagtctcaaggtcccacgtgattgccctcagatttgggtcagcgcctttcatcaacagcgcatttaccaactcttcatcaccactgcgaacggaatatatcaaagggttgccaccagtctgatcctgagcattgacatcaatgtctttgctcagaagcagtctcgctgtgcttttttcacccttgaaaactgctttgatgaaaggcgttcgtccgctcgtatttggcaagtcaggatcagctccatgattgagcaacagttgaaccatctcgtagttcgcatcagacactgctctaaaaaccagctccatgttcttgttagcgtattcgctgatagtgccatcctttggcagaagtaagcgaactgcttctaggtttcccgaagatatagccagctctagcggactatcctctctgaaccaaccacccctgatatgattgtattcaggattggtcccctggtcaaggaggagcttcatgattgagacatgaccctttccagcagcttccttaagtgcccgctgcttctgttcttgtccaacttcggtaccggcggaaccggatagcaaatacctaacatcggcttcatgcccttcaccagcagcttcctccagtgcatcatcttttgaaatcacaccatggctcatttcaggcccgatgagcttgacggtgctctcgtgacctgcccgtgcagcgtaggtcaaaggggtgtcccccttcgagtctttcgcattgacttcagccccgttttgaagtaggatttgaagccattcagtgagaccaaagtatgcgcaaacatgggctgccgttatcctgcatgtactgtacttcaagatgtttgatgaatccaggggtttgccccgcttgattggaggccccttcatgctttgacaagcagcagaaaagcatccgatgctggctaaaaactgaagcgcaacattctttgcatcatcgctatttgaatttcgcgcatggtctccccagtgtttcgtgcaatacatgtacaagggatatcgctcatgccgatccatgtatgattctgggttactgcagcggccgaaggaaaagggctcaaatgacatgtaagtgagacagtttagcgctacttgactctcggggtccttcaaaataccttctgtctgaagaaactcatgtgtggtgtaatgaatgaggcgcacaacatcggttgctcgatcccagactattagtcccgcacacagattatgaagaatatcaatatccagcagaagctcttcatctaggtcagactgcccgctttcagtcactaatgcatgctgcaattcgacggagctgagtgcttgtttgctgtgggcgagccaagacagagccttccttgccaaatcgcgaatttcatttgcctgtcgatcaatgtccgacatcgctcgtacataagtcggggttaaaccgtcctgacctctgggtagagcctcgagggaacgcttgagatggcggatcgttggcatcttcatcaggtactctgtatgaagctgagcaagcagaaacattccgtctgcagcttgaagcaccatggattggatatgttcttcgagatatacttttccggcgacactgaccacaaaaattggcaacttccgattcaagtataggaggatatcggcttcgtgcgcccgaatttccttctgtattgagccaggaaattttgacgaaacattcgtgttgttgaaccgtgaagtcatcagcaaattgattggaatgtccctttggatatcagatagctcagaaagcagtgtttggtggctctcgtaatccgagacataatattcgtccactgcatcaaggacaatgaacacacggttgtactgcctcagacattggcaaagcaccaccaacagctgtttgattgatggacgagagcccgcggtggcatgttctttgtggaggcgtttgatgttgtctgggatgcttctctgcttggcagtgacctgccgtagcagcacctgtagcatattctgaacagcctgttcagattttggctgatagctgcagtagatatatgcaacaacagactttggatcttgcttcgtcagagattgaagatgctcaatgatggtggcagccatgaccgtcttcccagcgcccgggataccagggcagaacaaagtttgaccagcgctttgaagccaattcttcatttcagcggtctcaagaaaccacaggcatgttccgtctattctttgggccagtctatcattctgcacatcgttgaagttgtgtggggatagccagtcaaggatggccatttgatgctcttcgagaacagccgtattgaggacagaaacactttctttgattgatgatacgtcctcactaactacacatgtcggagggtagatcagccacttgaactaccttggcatcacgaccagacaacggacaggcttcgatactgaccagaattcaagattttttgcgcagtatcctctgcttcaacctctttaggcgtcacaaattgcagcagctctttggcacaagccgatgcagctactgcagcgtagttgtgccaggtgtcgttcttgtgggaatctgcatagtcggatattccgcgaataacaaggcagggaaaggcgttcatcaacccagccgcttccatttccaagcaaatggcctgatgtgtttttccaatttcggtccgtgttggtgcgtgcttgacaaccgcattgcctgtagcaatggttccataatgaatcaccgggctggtatcatgtctttcccattcctggcgatctatctcatagtctttgtcgcattccgcacatgttcttccaccaacgtgagggtattcggcgtgaaacagcctatcagaatcttgattcggcctgacccaaccacctttttttctcaacttcgggtatttggtgagtgctttctcaatgaaagatgcaacctgactttcgttcaacatatgctcagtctccagccgggttaaggctgtcctcagagacctcggcggctgattcaacgggtacctggcctggattgagccgtctccgagcctcctgccgaagtcatagacaacgactccaccattttctttactggaactgacaacaacatctccaagccgcacatcttggacctcatcgagctcgtagtcaggaattcctgctccaatgcctaccatcaagccaaaacgaatgccaggaaaggtaaaaagcatgtccttggcaaccgcggcggcggagctggagccaatctcgttctttggcaaacatgtgatgacaacattaaattttcccacggctcccagcaaataaatgttgtcatctgcctgcttcggtggtgtctgtgggccttcgtgctcctcgtccaacatagccttggctgcactcagctcgattgggagcgcacacacccatccgactgtgtatctttcattcggcaagctagtcgacatgatcgtttcaattgtcttgatgagatgtaaatgattttaagatctcagttctaataacaagtacgactcgagaatatgaaatgaggtgccagatatccgggatccaggggcacataaaagagcaaaggtttacggcccaaggcatgcaactcagccgcatctttcccgtacaaagtacggagtatccctatgtaaacctgttttttgcccaagttgcgacacccgggcaaagatcagcacacgctaagaacttggctgcatcagatctgcaaacccgggcgctcgtgccaatcgtgctagggagtacggagtagtagggaccaccttctcagtttcatatttacgcatctgccgccgagtagcaatatgacacagaatagaggataacccgtctagcagtaagacttctgagttgggagaatatatgatcacatcagcttctggtcaccggccatcgagcgacaatcagttttatatcagcaacagttatgtgggcaaggttgattatgtactcaaaagcccatagtcccatatccatccgatatgcagtaactcgcgacacaagcaagccctggacgcggctggtcctcggacggggactgtcccaggaataggaaccgcctcaggacaaccggggtcgcaagaacactcgacggaactcacatgaccaaacatatcccatgatagggttccccagacgcgcccagggccagtgcatggtataaagttttcaggaggtaaccggtaccttgtaacaaacattggaccggtcacgcttcagagcattgctccagaccaacaggacgggagctaacattgtttgcaaattctcttcgtcagagagcagtggatatgctatggagaaatgcctttctttcgactaccgtcggacttcgagtcattatctgttgatgtgcaaggcgatcatgttgctattggattccaaaatggtcaagttttgtgctttgacattgatcgacgtatcctgcagtcagtattagggtacgctctatggacaatcgagcaggccacgtagatacatagaaatccggtaaagataagggtccaggcacgacagtcaggcagattcgctgctaagagtcctgtactgtcagatgccatttttcagcacccacagaccttttgtatatcctttcaagtcctagtcaggatctcgtccgtcgtctttattgtttctctttccaacgttcctaccatcgccaaatgtgactgcacattagagtatgatacaacatatgtattgctatattttatatcatgactaacaatgccgaaaagagctaaagaatcgcacctaacgccaacacgctttgctagaccagttctagaatgggaatcacttccttcccattttcagcctagtcacgaatgttttctacgaataattccgggttccgatccttgtagatgtggtcaaggtcaaacccatctgacagcgttacgtcacagggatcagtggctctagatggcctatcaataagttgccgcccctcaaaaagttggcggccgtaaacaccgtgctagtcatatactaagcgagatcctattaatgtcgtgccacaatcctgctagttgtgaatcgcctagcaaacatgttgatactttggtctggtttaatcatcccctctacagccatctattggaatgccgcagttttcgagttgagagatgatgacgtgggtgctgcggggctctgcgagtaaatcgcaactcgctgaatggatggtgagttgaggggtaatgttaaatgaaattatataaaagggtagttaggcgcagttatttcttatgtgctaagaattgtcatttcgctacttccttgttttcaaaatttataaaccatctatttgtgaatttgctgaagaaaacctattgatcagaatgcctgttatagccatcaactcgtacgtgatgttacaaacagtttcccccctcagaccatattgctcagtgctaatatttccaatattgtaggtacgacgaattcaatcaaatcatcaacagcgggaagcccgttgtaatcgacttctgggcaacatggtgtgggccttgccgaactatatcgcctattttcgagaaaatgtcggagttggcggagttcaacaatctcgaattttacaaagttgatgccgatgaacaagaacgaattgctcaggaggtcggcgtacgttcaatgccaaccttctatttatttaaagacgggtttaagattaaagaacatgttggggccaacccgaatggtttggaagggcttcttcaggtagccgcttctggagcatgaaaaatggaaggcaggattgcccccattgctggaaggcggggaagtagtgaaagatacctatctttagagaattaactctttgttttccgcccataacattttcccatcccataataataataataatgacttatatctaggtgacggaattgtggattcagtgtggccgccctcttgctgcctatagctctttagctaacaaaagcgagctagttccgatgattgtttcggtacaatagttcttagactttagcactcaaaacgaccgccctcatctacataatatcttagattttcgagcagaggggcctagttcgatctgacttactgtaccacagtatgaattttagctatagtatcgcgcaaaaatgaacataaaaaataattcaggtattagtacagctgcaccacacgctaaaagtggtgcagtggttcattaaccataaaaacagtcttagcaaagcctacaaaatgttaactcgttcttggcctagatcttgtcaatatttgactattttggttcactctgtggaggttcagattgtctacctattttaggtggcattccattgtagcgatactgtaatagaactcgtccgtcccttaagggtctatgtccacttggctggaaaataaatcaccatatatcacacagtgtatcgactatgggcccacgccggaattcacatagttgagatgtcgatggtgaggaggtggattactgggaacgtcgaaaataatatctcgcgtggttgacaggcgagggggtagttcgctaatccaaggagttcaaagagatgacctcgagattttaaagggatctacccatagaaatcattattcacgacttacacatatactgtgagggagcatgttcatagcttacataagctctaggtagctacacctagagcgtagacaacatcaataataagcatctttaccaccactaagcattttccataacagattggtagcatatcctgttaaaccagaggtccttctggttaggcacacctttcagctattgaatttcaagtgtccctctcgcccctaggtcgctagtagcgaagggaatcctaagcttcatcacttctatcaaccaagtacccactttcaattagcccaactaattaccttatcattccaatttcaccctacgtcaaacgtagcactaccttatcaagtatttagtcttaacctttgaattccgaccacatcgttaccactagaggcagacaatttttttttaaaaagcctgcgttagtacagtcctagcaaccataggacccgagccctaccttcgattagggtcgcgagtactcgcggtcacaggacccgagccctactttctcttagggtcataagacccacaatacctagttacctgcccaagtcccccacactcttcctaatcaccaatcagggtaatatccgatacctcttactaagagacagctctgtacctatatccttatcaggtaccagcttcttatatactttaataaatacaatagtataagcgaagagctttagaccttagaacttaatcataagatcctctttatcatatatacttataatataccctacctacctaaggaaaacccctacctaatagattagctacttcgcaaagaacttataagggtaataaaagagttctatttactagttataaggatactaacctataagccctaccgctaaatctaagataaggatcgtctattatagttctagctactaaggataagtctaataatactaacgctaatctttctatagtctagagatctcttagttagcctaagcgatctactgagcgagtattcgcgagctagtaatgtaggtatagactatagcctcctacctcttagtactctaagtcttatataggagtcctatctagaagccctagagggactgcagcttatcgccctattaagggaagagttaagtaatatcatcgagtaagctatagtatattcttactaggcctataatatataagcgatagttaataaggttattatagcttactataaggaaatctagggactagtaggctaagatagctaggatactatatatagttctagctattagaagatagataatatcggctactttactctagatctaacgttagatacctatatctatactataaggggaagtatatactatactaatatatatactttcctaaattagctctaggccttagtttccttaaaatctaaagaggttatctaggctaacttacctttatacctttaggaggtagctatataatagtatactgctgagttattagataaagagtattaagacttaagtatatactccctataacttagctagtatattatactcgagagacgctttaagctatatataatagaggcgattgctagagtaatagttcctaccttagtctactcctagtataatatccgcgcgggatatagtattatagaataggcctagaatatacttcgcgatatataagctgtagaaatcactaggactataatactcctatatctagtatagatatatattaagccgatactctaatataatatatataaacccagcctagtaataataatcttacagtttatagtagatctcgatttatattatagttagtagtataagatatcgcaatgtacctaggtatagtagtatctaatatagccttaatactaccctagatactaaggttaggcccccttatataacccttatctagtatacagctatagtattagatacagttacctaagtctaggataccgactccctttctacccctataatataatacctataataactaatactccctagcctatatagaattaagattagaattgtgactaataatagctgtagtagaactaaaggactctatatacacttctactaagtggcccctaggtatagtgtgtaccttatatactataatagtattaatagtagcagctaaataatcgtactaactaggtaggttagcttttactagctaataagctatagaatcaagtaggctactcagctactggatatatagcgcgttaactgcgatagaattatcctatagctatatattaggtcgattaggctgctgctagggaatataggtagttagatactaatcttactaatatagctttctataatagcgactatatatataagcccctaggtatatattatataggcggagaggataccagttatacagaataccttcctaaggaggatctataagtatcctagtaagctccccctttttaggaagagtaggacgactaactatattattctattatagaggacgttataccttctactacttatctatattattataccctatttaaatcgaataataagctatatactcatttaaaggagtatattatataatatatagctactacagttaataactcgatagtggtatactatacgactaatctagcaggtatagaagtagatactatcctagctaacttacctataataaagttagataggccctatattacctaactaggtatagtatataagacttagcgctatatattagcagttattagactaacgatatagtagaagctacttattatatatcttaataccggctatataataataattattaatatagatcttataaagtctctaggtctatccctatagaaatatactctaatactagttataggtattaggtcgtactacctattattagcctttatcttatttaatatattttttagaggattagataatatagtatatatttatattaaagtatacttagtcaataatcttaaagttaaactacttattagtatagatattataggatataaaggtttccgtttagattttaatactaagatagttaagattctatcttatataggtctaacggtacctatctctatatatactaagccctattatactgtatagtaggtagtctatatagtagcttaggttaccattcccctatagtctattatatatatccctatataggtataggcgttattcctagaggactaggattatatatttaagggttattatagctataccgctttctattcctaccttatagcggtaaattttacttaggtctaggctattaataatataggctagtaagtatcccttcgccgttaggattagattaggatattatataaagtagatataccgatagcctatatagttaaactagaagctatagagctagaacactctcctattataactaatattagatatactaacgagggtctatattatatataggataacggcgtttagcttattaacggtattaccctctaggctagcttagagctatcctaggcctagtagcttatagagctccttatatcttataatatctagggtaaatatctaggtattattaatatccctaaggacagataaataactattccccttaagcctagctaggaagtatagcttcctaagtcgaaaatctacctagttagccctaaggattataagataattaacgctgctttttaactattatataactaagggaagataagttatataataggatatatagctacaggtttccctatctttattatatagtgtacgatttaccggcctaggcgtaagcctaagcgtaagggtcgcgctatagtagacctatggctactaaataaggaagtcatatataacgtttatcctattctaactatagataatattttacttctaatatagggcaaaaagtttattactatcttagatatatctaagtttttttattaatagagtatctgatataagtatcgcggtaggatatatattatctcttattaggactaggagatattttatattataatcataggattctataatagtataccctatatctagtaatagatagacctactcctaaaagagtttattaagttctactatacctaccttaatgatcttattactatttctaatacctttaataaatatatcgaatacttaacccttatccttagtattctcgaaaagtatagggtagctttagaacctaaaaaggtatatattacctttctagaggtctcccttttaggctaatagatagatatattagggataataatactagaggataaaattaaagctatcgctagcctagagtttccttagatactatagtagctagagatataccttagtataaccagtaccttatatcagtatattccttactatataaagaaatctaaaccactctagatctataagacagagctcttatatagaagcctagttaagggccgtctgtattaagagtagtctatatatactaagtatatatatctaatagactataaattagtgttatttaatactatataggtagtcttttaagacctttagtagctagtacactaggactgtagttataggctctactttaatattaataccttataggagggtagccacagcgctatggttttctaccttaaatatagctataactatactaatttaaaggcaactcctccttctatagctatagagccagttatatttttaagctatctattaatactagtagagaagtagtactaggtaacagagttagaggtttcctatattatataggttatttataagatctattatataattaaggtagcgctaaaggaccttactccggttatatataccgactatattataacaattaacctcactatatcgctatcctctgtgttactagactatataaacctatacctagtatatactttataatacctatagcagttttatctacttatctactataaagctaataaactaaattatattatagatactcttttgtatctactagctatagataaagtagaactataagaggataataaccttaaggccctatatattcattctatatctaatatagcgctacctagtatagggcctatataggacatccctaataaagtatatactttccttatatcctatatacagctctccgaagaatttaaaggatatatacgaactatatattaagaggatctaaaatagagccttatttttagtaaattctagcgactcgtagaggatcctaacctaattaaaccatatctaccctatactactaacgatagtttactatattctatataaacagatagcgaccactagctatatattcctaatctaattaaaaacaagattttcgagatagcatatagtaaaagataccttagcttctactatacctagtaaaagatataaggctttattatatataaaggagtaaagaacctctgtacttatatcaatcaatacgataagtataagaaaaacactatatactattataagccttacagttcgctctagctaatacttatactacctattcctttttatatacttactattaattttattataggtttactataaataaagaaagggtttaatactatagctatctatatatataaatctacaaaacacattagtttaacgcctaggaagaaaacctagaaagggtataactaggtaactataatactataagatctctagaaaggtaactagggagtccctattatatagatttctaactataataagtgatttatcgaaggcttctagaaaggtctctttactaccttatatataaagctcctatataccgtagtatactatctatctactaatagctaatctaagcggttaaactagactatagaaatctagctttactattagtagaacctatatcaggataccaattaggataaggggctcacgctaatataggtatcgctaaatatatctaaaaatatagctattaataagtcgctatataagttaatatttagtattaacctataaatactatagaacctcctttattaggtatttatcagatcccccctaactacctagtaagacgccgataagtatactaagtactctgtaatagtaataaagtagtagtataataggtagtatatacctattttctttaaaaaaggtaagtatatttacttataccttatctaaggagtagagcctagatatatcctactatcctacagtattatgtaaaaactgatatagtattacattaaatactacgttattaaatatataggataccttatatactagctacagttcctacctaagttagcgggcgcttatccagttatatctttataatatctagagtgtatacctactaaaggggagatatctatagaacctctatcgaccattaatctatatttccctagagatatagattagaccgatattaatactattcttaatatacagtaccgcggctatagtagggatcagtgaaagtaatacctagtttagtagtctaggcttagaaataaatacctagaatagttagataaggataacctcgttagagtagaggagaaagtcctagagtatctctaagatatcctatattatatataggattctattaattaaccataacctagaaggaatctctctatatttatatttatttattatactacccctctatctaccactagtaccctattcgtttactcttttattatcttatttctatttctactacttcgctagtatctactaccttacttatcttttagttccttaactattttaattatctagtacctctcagttttcttccttctatatcccttagcttactatttaatatactacttattgtcctacccttatcttattaatatacctatctagagatctattagttataggcgttatccttaagctttatagggatatacttatacctattatactatagtaagtgccctaaataagaacgctatagtatctaaccctactaatactaaggataactctctacctactactaagtataatactagcttactagcagataatattatagataatagtaacctaggcttacttaaggaagcgcttatcctacctaaagatagatagactatagataatctaaggctaagattatctcctatactaagaactaatattatacaatatactttatataccgaataaactttcgtgcttatactctactacttctataataagtctaccctatatacactatattaggatagggcgaatatattatacctaatcgatagctaatataatagtaagagacctagccctttattagataggaagattaatatacctactatagcgatatggtttatcttctactttttaatttataactattaggataaccttaaatataaagcctatcttaccttatcttacgtttaactgatagataagggcgtcttctactacctatatataataatactatactagagaaattcctacttttagacagactttaaccaatatagggatatttatacctcgcgtatacctctagaccccctaatgattatataggctaatagattaccctagttcctagtttataaagtattttatatcctctataggaactagagccctatatcatatcttataggaaggaagtaccgctctaagactacagagttttatattagtatagtactagccctacctactactgtcctagccagccttaaagattctctactataactaactctctagacatttaattcagcgacttacctagatcctaaggatataaatggttcccttaacctcacttatatcgccactatcagctatagctaaaataagaccccttaccgcttttatataaaccaggaccctaaggggtatatattagtctactaattgaaggctaaggaggacttagcgttctactagctctaagatctaactagttatcataagtatatctataatataacccacaactttccttctatatcctttcctaaagccaagctatataatatagcttagtaggttattcctaaagctatatttgacgatagctttacctataggaagccctttctaggcgttaacatacccgtgtaagataccggcactctatagctagtcctatagacagtaatatatagtattattaactctttcaggaataaaaatatccgctaatataagcgcgtataccgagagaaggagcgctatactaattctatatctaatatacacattccgtcctaggaaagggtcgctatatcgaagcccctctctagcctactacaaaatatagagctacgcttccgtatcagttaggttaacagtaccctagacatcgtcagtcctattatatccctcctactagtagtagaggccttatttcagaacatcggtagctctaggaggctggaacgtattgcctccctaggccataccggcctcatcgacttccgcgcgcgtttcgtcgagggagacccccgcgttacctgcgctatatataaggggctcagcacctcactgaacgctatccgcgacaccatagcatttactaagggcctactgctagttaaccgatacattaagacggtaaaggatgacgccgtaaggcttaaggtcgaagccatagcatccatgatacgacttctaccagaaactcctttacaggaagggtcacttgacttctaactgaggctgccgaggacggtagcaccctttccgaagggggcacttgtgagggagcatgttcatagcttacataagctctaggtggctacacctagagcgtagacaacatcaataataagcatctttactaccactaagcattttccataatatatacagagtagtgcgcgcttcccggacaagatccgaaaagcaatgcgtctgcattctagctatgatggctactccttacagttacgatatatgaagtcttatatccttgagagtatgttagttaaaatactgtaacttataacttaggtaattgaataggcataactaactagttaactattatgtctccgagtctacccctaatatgttatattatttcttggcattacggtttaaggaacaatcgaagagtgtaggtggtaacactagtttcgagacgtactgtacttgatattctgttatgccattctgaagcagtctaggagtttgcggtagctgttgtaataggacttctaggtcattctcggagtgatatagtagtcggggataaggctaagtccacaatccagagcttaacgcagacgtgccaacgtacgttcctggagcgggggcacctttaacattcgtctgtttggcctgtttgcatgactaaggttctagaaaccctggagttcagtataaatccccctgccaatcggttggctatcgcaaagccaatcctccatgtagtccaatggctatgtcgtgctattgttggagcttgtatctctgcgtatcgctcatggccgctactgttatcgtcgggttggttgtgctgcgcctgccaattatttcgtggcctaagctaaaagatggaacacttaggacgctgctgctgcagaacatcccgtttcttatatggcgatctcattctgtaagtgggtcaaatttaggaattcctgcaagtcgtgttgatagtgggtctcgtagatatggaaggataattgagcgatggtgtatgacatatattgaatcccaacgtgaaggccatcctgatctcgactaacctgtcataggaaaaggggtgtttggcatcgcgagcgaaaccggtcgtctattcgagtagtcagactaggtataaatgaagtcgcgcattgtttgctgatctaacctcgaggcagattttgagactcgccgggcattattctagatacgacaatttgatgagtgaaagccacctgagtagttacaggtcggcgcagcaagctaacggcaaaattgtctcagattagtcgtaatgataggggaaacagaagacgggctggagtgagtaaaagcaacgtaaattgattgagaggtacgactagtcgcacagaagataacgcagggggcggagctcggtgatccgaatgaatagtaaaaatgccccaccaaatcgagaatcaatgagactaagaggtgagggtaagaaacaaggggattacaagggattgaggagggttttatagatccacgcacgggaacgtataacgacaaagagcgctaagccgaaagggttcgtagagccaataatatgtcctttcttcacccaatgtccgatatggtgcaatagggtgtcccggtgaaaagaccatggttctgcgtggcatcttgtgggggaaaccgtggtattttcgcgcaggcaagaataaaggatatatatagttcttgggagatgattgacctaagactagccaaaacacgacacttgcatatcccagcggctccatcatgagtccatcattgtagcccaaaatagtgatataaccggcttatgtccgattcggtccagcctggtaagcctggcgcgtgcaaatcccggcggcttgttcatgagttctgagtagctctggtataaaagccaagattgtcacccttcaaatttcttataaatcatcattcaatcatcatttccttctgagcctattataattgagatgccatcaaaaggtcctcgaagccgatcacggactataatgcctttatccggctgccagacctatctatcaaacgtaagagagccaaagtaataaaataacgtctacggggaattcatagaaggctttattcgctagtatttagataaatataacgaagaataccactctagtcttaacagtggtgaggcttttttagaatatattagagcgaagaaacaggccgtaaccttcctcgtgaattaggacaggatgtggctgcagtattctttaaacagtcaatttgctaatcctttgctgaccagagaagctttctaatgatcttagtaaagagtataggcttaacttacgcgctaagcaatagccgccatttagtatcaacgagctcttacttattacctatcatttgctagatacctgcgatatagctttttgtactttccgatgccttttacaattaaacacgttgcgaaaaatgataacttcaatatcagcccaactctgtctaccgggtacataaggggcaatgatgcccttaaatagaaggatattaagctattcatggtgaaaaccccttaatatgtatatgccgaattgggcacaaagtgcgggcggggtttgggggtacttttgtctttgctggctgtcagatcaagaacattcttttcaccttactcttacctcatcgcaatggactctattgaattttcaaatcgttcagcttatgcaactgaattgggcattgagttccttggccctaacgaattcgatcgctggccagagacccatcgaagattgtttgaagatgtacaaaagctcggcaatcaaaaatataattcgttcgttgttcgcatcaccagagaatctattcaaaaaccatggatgcgcgcaacaaaggcgcgcgccgagcgtctctcaatgttggccgaacgatcctatcgcgaacacaaaaacgagtcgggatggaggtacgcagttgagaacgagatcatgtaccgcttcacagtggaagtttcctggtaaggaaattcgaacagtttgttgaatccagacttaacgtacggcacagcccgacttgtcgcaataggctatggcaatctgaaatacctgctgcaacgggtagcatcgagcagcaagcccgctcactagaggatcgacgacggaaacgcaagccatgccagtgttcaagcgctcgaggtgacaataggtctgttttgtgttctatcatcgaggaaattactagttattccttctaaccagtccataggtatgatggcggagtcaatatgctcttttcggacagagcggaggcgatgatcaaacacaatcccccaattgtgatatccacgcatccgcgtaaattgaagaattccgaattcccagatcgcatctttggactacgacagaccgacaacctacgatgttcgctagactcgcttgataagaggcatatggaatcgtccaacataactctgcgtaattccatagagctgagtccatttggtgccgagcctgagcctctacttttcccgttcttcatgatagaagccaaatcaagccagggggctgaccgagcaaaaaatctaatgcagtctgcattttgcctccgccgtttgttgaaaattcagcatgaccttgtcatcgcaacagatgaggaaacgcagtgggcaacagggccgctcatatggtttcttactacacgtggagaacagtgggacgtatacgcaggatttgtggaagaagacgatagtgaagttgtcaaatacgtaggtgaaaattattccctacagaaatcattcgaggtgcttactagcgtcagccttttgttcatctgtggaatggagacattcgctggcgggacggcgccttgcagcttctgctggttattgactacatctttgattgggctcgtgatgtctaccgagatgccattatcaaagaactcagcacaatagcgactggtgaagtaaacgaccgagatccagatattttttcgacaatttctcgacagatgtcgcaaattactagctggatggaccccgacgaagcgcaaaccgagctctcattcatttctgaatcaaatgatcccggctttttgaacataagtctaccagagggcgtgatccgtgatgcttctatctttgagtctcgtttccttttgctccaaattactgaggatgacgtcgataattttcttctctctttctcatctgaagaggatgctaaattatggcttcaaagtgtactaaatcatcttgcaaacgcctggaaagtcagctctaataccatctgcgccatggaaagcatttggactggggggctcaggctaacacgtgggaaccaccagcggcatgaattgttctatatcagtatcacaatactgatgtttattaccaataactgggagcctacaaggcagctcacgtgccttgcaatttctgaaggtgctttaaacactcttttagaaaagtttgcgtgcgagagaacttctagctttgaccgttgtccggaagtaggggaatcaagtatgcaaacttttctggagcgcatcttgaaacagtcaattatggataatcttacagcagcgatatctatgctgtgtctctcgagtttctcttctgagcatgaacagacgataccatactatttccaggtgaagaggtcaagagaagttactgctggacttcgagttgataaatctcctcacctgacacaaatggtgcaaagcgtttacttgaaccacaaaatcggacaaagacaaccaatggatacatatgtctccttctcacgccatcaaagcaagcaaaacatcgagtatagaggggatacgattgagatgtggcctcatttaccacgacttgtgaaaagcggaaatgatggcgtattggtggatgggatgttccactcgggggatttcccaagacgagggctctttgttttccgtgatttggataactatgaaagcctatccagtctattaactagggtatcaagggatggtatctacttcaaaactttccagttttgtccggaccaaccctttgtggatggatttcggcacctcaacagcccggtccgatttactcaagattggctaaaacggtcaaagtcaaagtcaatactgtgttggagggaaaagctggaagccttggaccgcctacgcggctgccaattgggtggaaggccatcttctccaatgatcatttcgtcagatgaagaataagacaaggtaaatttgactaaactatcaatggtaataagcgaaataccgttaagatacaaattgttagtttcaaggagaatatattcataccgtggaagcctgggactcaggatcgttcttggtcaatattggatttggaatctaaggtggaaaagatacgtataaagagttcacagcacattatggcgtcacggatgatgatatgcacagtaaagagagaaaagatcttctacttgaacaaaggtctcgctaggcagaataaggctcaagtcggtcctaacatacatttcataaaccagaaaactttgttttcactcagtcccaggggtaaatgatgccgcaatgcaaatctcgagagaacttcgcatctctttgccggggggataaacgagagagactttgagattccgaccatgtagttccatccttacatcataccagatctcataatacttgttaccctgtgatcctttcaatgggacaggatattcctctttccacttggtcaggtccacactgatcatcccagcgctctcacaccctgaatatatgtcagtctccacgttaatcgttaatccggcgaatacactgcaattatataacaagatattactcacctagattgtaaggatgagtaatttggtaatggtcttgagcattctcaatgtctgagtagtacaggcgctgcgaaaagtcccaatcttcgttttccccaaattgttgatacagcgtttcgctaaagcaatcgtcgaaagcaactatttgaccctacgcacggtgttatgtgttaaccagaatcattcaaacccaaatgaacaactgcatgatgagcaaaaggggtgacattttacccttttaatgacccaattgacacagcgatgaacataaagttttttgtcctttgggtgtctcgttccgccgggggtatctctatggccagggtacttgttgtcatattcctcattctggagaatcccgatgtttgccataatctgacgagagggtccgttgcttttgtcgattgcacggtatactgctccccgcgaaaccagagtctccgcctccctgccacagacaagtaagatgacgttttttaatcgtttcgaggggtgaaagtaccaatctgattgatataaaggctggagctcctggaattcttttttcaagaattgtctcaaagtgggtgactgtgaataccctccaactagcataattttcttggttcattaggcagggttgccccatgattctcaaaaattggcagccttacctgcacaaatcttttcttctctttggatgcaactatttgttcttgaatgagcttcgcgataccattaagactgtcctggaaccagccaaacacttcactcctgaaaataagcagaagttagaacatagcctcagatagattgaaaagccggaagccatgtggggaggacgtcttaccacggtactttaaccctgtttttatagaagcctttagtgtcatctgcctctagaccatgaactatgaagtattcaaacccgtcgaggccttgcgaattgtcaaacactcgtttcagagtgccttcgaaatgcggaagaatgttatgctgaagctgctcttcggctgatatgtttttttgttccaaagattcattgtttctcagcaggtctctgaaatgacgctccatagcatgattcacatacaccgagccaaagttcccacctgtttcaaatgtaagggcttgatattcaacgcgaaattcagacataccggtaggagtggcagcttcactgaatcgaaaagggcttcgagaatcgattgtgtaggtggtgacatcctgtgtagtgttgtaagccttgtaatattttgtcaagagaaagcagcaactaactactgtccctcctccggcatcacacacgataaatgtttctcctgtctataattaatgagtttaagcttccaaatacattattgcgctcttatggtccaatacataccataagggatttcgcaccaacgagctggtcaagagcaaatgccgacgccgcctcgggttcgtttaccaagaacaaatcaaacccttgaccaaaacccacagcttccactgattgtttcaagatctcttgtaggctccaagaagctttgagtggccaaccggccggaacagacagagctagctcaaccttgcttgtgtctttaaagctttcaaactgacctagatgcttcttggtgtgtctgaaaacttcgaccagataatctcgaatcacatcgttcacatctttgcctaatgccttcaaagtttcttcgagatcttcatatggtggggccgccttgttggtttgagaatcggtatatgagccatttgtagaagagccacggttcccttgatgattgtgaccagacagcaagtcagctagaagaagctttgaaaacttaattggcttgttagatgcatccaacgcttcattgggcagaacctcttgggctttcagttgagctccgtagccccagtaaaaatcatcgccgaggtacaagctttcgctggggacctcgcccctattgtgactagaagcagcgttgggccatgcaataactgattttattgcattcttgcttatacctgttgttggtcgtttaccaagcttgaatttatagtatgaaactgaggtcatggtagttccaaagtcaatcccgacgagaaatgtgggatttggcgttcgggggttgccatttgatcgcttcgaaccaggcgaatccactggttgttctccgaccgtcttgttggagcttgaagaggtgatacgttcattatcgtcagatagaatgtcttcgtatcgccgctttcggtagggcatggaccgctttgacgtgggaggcatatttgatcgagtttcgacgaatttccaaaataacccctggaggtagaaattaaggggcctgtccgtacggaaaattctgtgcgggctaattcatagccacagttggcgcttgcgctagcagggatctcgttgtgctgaggttagcatggcgcagctaacatagcacagcctatgaaaccgccctcaccgactattctcgcacattccagtccaacccctggaaactctccttatcttcgtcagctgcatcatcaatctggttttgttgtacatggtggtcacctgaccatcagcccggtgcggcaggcaccaacccccacaactagatagttgggcattctgcccctttaggaatagagaactctctccctctctcattccatcactacactgtagttgcatcgggtttgaattctcaaacatatcaagatgagtctggaagtccagatgccgggggttggatcatcgcgtgcaggatccacgagctctggtctcagactcgcagaacggtggtattatgactccactccacccataccggaccagagtgatcattttccatatctcatgctagacacaaggctccgtcctaggcgagataaacgcagggaggaatcaaatccggcgcctaggcttaagagagagctgtcagacgactcttctacaagttcagcggcggttaagaaccgaagaatactcaaagtttcaacccaagtaggcattaaaatcgattgagtggcaaccattgttaaggaacactgaccaacagtactttagcggctcaggggagccgatcaggcttgcgtcaattcgaccagaatctgtgagacaaatacgagtgcatcaatccccgccaatgttgaaaccccgcatggaaacaccagaaacacggatatacaggacaatccagtttccatcagagagactaaatcagacatgggtcttctgaagcggcagaatgacctgctgaagcgggagatcgacctcataagcatccgccgcgacaggaaaattgtttctttacaggaaaatgtgacctgtctccaagaattcaacaaagaactcaatacaatgctgggccaatacagagaaatgaaggaagttgagacccatgcgtctggggtactggcagatgaagtcatggaactgagagcaaaactcagacaaagagacgagcaattagaaggaaaaatccaccagatttctacacttgacgagcagcttagcgctcatgaggggatgatacaaatcaaggaagattggcgtctcgattttacttgttcctcaagcttctcaaaggctttggctgaactggaaggaaggacccggcgcttagcagacatgcttgcgcaatgtttatcgaggcagaagatctcaaaaatgcgtaaaaagccacgcaaggaaaagttacttcatagcttcgttaaacgcctacttggaacagtgggcgttctggataccaatccaattgaggcgatgcgcgccttaatctttggttttgtgcgagatcggatatttttctctgaatgctggacagctctacactctgagggctatatactgcgagaattacaacagttgatacgaaagacctgtatgtgaccagcatgcctcagaacaagctttggctaacctcactgtttcacccaacatagcccctcctggtaccttggaatcactgcacagagcttctgttgaatcaatgctcaacgatgatcatcagtttaagcattgttggatccaaaaggaagtggaagatacccaaactcagttcctgaggctattctgcccgttgttcgatactcaggtgtttgaagaagtcaagcatcagatcaccagagacttgggaatcgcttttgaaggtgcttttgaagcccgtgctcggttcataccgcctgaggggtctcggtatagactgttacacttcaaggctggggaaaaattcgatcctgcttatatgaagatcgaagaaaccaattcaaaagcaacttctgcaatttcccatcgaggtattcatcggattaaggtatgtgtccacggttgccttattgagcaccccatcaacaaagattcttcttccggagatattcctcaatcactggatcagcctttgattcctgaagacggggggctctgtggcagagaaacagggatcttgaagagcgataaggcaattgtcatattggagaattaaatttatctttgaaaataatgcatataaaacagccttttcatatccttgtcctcgccttggtatctgtataaaacagtctgtgcaagcttcaccaaaagctcgcatcatttgcggactatagagaaccacgcactgcaatgcacagggacggagagcgctcagacggggatgcaaaagtggaaacaattagcatccaccaagaggcgtggtctgagatcgaagaatcgtggcgttgtaatctagctattgttctaatttggaaagccaaaagtcatctagtggatactggctcgaacttcaggaagacatggatggcttaattagctcactgtcaaggttgatggttggcgtctatataggcttgtttttcattgtggcaatcttgctaatattttgtttccccacttagaagggttcggtcgctgattatttttgctcaatttttgaagagatgaaagatgcgaacgtaatgaaaaccctgggtaagtggactctctggacatttaagcttgtcgtgagcaagtatatattgatacgaagagaatctgcgccaatttgctaataaactttataatctataaatctataaagataaccaacctactcttcggtctcgaaaattgaagataatatctaggtattgcagtgggggtttccacagcatgatgactaaggggctatgtgataataaagcacccccgaggcatagatagcaacgaagacacctttccaccttcacttctcaggagtcaccccatggtgttctcctctctagcaccctactactccaagtgacgattctgctctcacacctgtttcgcaggcaggcatgtcgttgaccctgtcccagggtcccctcttcagtagctactaaaagcttggtgttaagaaaagaaagaggcctacctaattattaaggcatgaataacttgtataaccaattttctaggtgagctctagaactgttcaaaggtgagctcattatgatcagctttatagaaatgagctcgttatgagcaatcctctaatctctccatattaaggaagaagaagaatctctgtttcagatgcttaaggattagtcttgcaatcaagatgaattatactgccttagagcctcatttctatcctagttgatgtaatttcatattcaattcatacgtctttcactatcttcttacctggactttaatcctaacaaaagcaagatagtaggttagaatcactaatgaaagctttatattagccaaattcataaacagattagaaacagagctaaaaataggtggttaaggctcaggtagtgaccattaaatggctttgctctagctaggtacctagttgatgttgattagtataaagccaaccttagaaattgccaagtactgagatcgatctggacgccacgaggggtggggcataattatgcacatgtgagcgctttataaaatttatctctcaacatagtttactagctggacgaagaggatttctcaattttcgggaatcaatttcccgagaaagtctggaagtcctgctgcatccatttagaggctatacttaggattcggtgaaaaatagggtatttcaaactgaggaactgaggtattgaccttataaacctgtattcttctaacatccaaggctagctaggtaccaaagggaagaaaactagcagtggccccacttgggcacgtcgagccgttctgttcctaagccctagtgtctctactccgtacgtaagaatttcattcctttcggagtaagtaagtaaaactctttccggtactagtagaaccattttttatcatggtaaaattcttagcgctcataaactaatttcaaatggctccaccgagtgcaatttcccttgttacgccactcggaccctcaaggggtatacgcctcgacttcgctaaatagtagtcctcctgcctcgcccacttgggatacgaaattgctttaatttcgtccattatctaactctcctctatttaggagagcttacccaaatacattgcaatgatagtattgcggacattggcccctactgccgccctagcactggcagttttgctacctctgtccagggcacagcagttcgtcggaaccaatatgtttaccaactatacgggactgagtacagagtgtcaacaggcattggcgacaaatgtgacctgttcaccgtacctaggaatgatctctgagaggtaggtcgatttatagccagatatatggcccctccccttagaacagaaacgctattttagaccaaattactgatgatcgtgcagcaatggtattatgacaacggattagatcgaggccgtatgtgtcgatggctgctatagttctctggaaacagccagaactaccatcgtcagtgaatgtacccttgatacggatatcatcgtggtcgagaacgtggcataccccgctatattctttgtggataattacttattcacatatgagttgtcttgccggaccgacagcaccacgggtcagtactgcgatccgctcgtagcctcatggtcgaatcagtctcttacaacgagccagttgtgctcagactgctggttgggcgggctcgccctagaactggctagtcctttcggatatgatgatgttatggcgcaaaactatgcgtctctgacatccagctgtaatgcgaccacttacagctacgccactccaacgcaatatgcactgaatgtgacggccacgactaaaccagcggccgtcacaaccaccatggcatcgagttgcacgggttcatacgaagtatctgtcggagatacctgcaactcggtggcccaggccctcaatgtgtccacgtacagtctgctctacatgaacaacctggatctatactgcctgaactgggactccacagtggttaatactactctgtgcatcccgccacagtgcgagactcgtgtgtggcagtcgaccgacacatgtgatagcgtggtcagcggcctgtccaatgtcacgattccgcagttcctgacctggaatcccaatttcaatgctctgtgtcagaatgctgtcaactatattgactatgtggtttgcatcgggtgggttgtaatttctcgtcttattcttgtcccctattgactagaacataatatgctgaccatggcccatttttaaagtccccctggaggttatctcaaccacaccaccgacatgacaggtaccgccacagtacagaacccaactaacatcatcacggccgttcctgcacccacaaacgccctcaatggatccaccacagactgtggcctgtggtatacagtacgcttactccttgcccccatgcacctactcattccagttgataataatcgatataggtcggagagggagacacctgcagtctggtcactgttgccaactccatatccctcgtggacttctacttcctcaacccggagatcgatgccaactgcaccaacctcgagcttggagaggcttactgcattgccgctgttggagacatcagcacatactctggctatccagtcacaacccccttatttactgtgaccaccgccagtttccccgccgttgatacgtcgattcccacgaccaccagtgatccgggattcatctacactccaacgtaccttcccacggccccggacacacgtacagactgtgtgcgatacgtcaactatgataacagcacttataacctcaattcttgcaagtggattgcctggctgaatgaggttacaaccgccaacttcctctcctggaaccccagtctcaactcggatctgagcgcgtgtgccatgcaaccggggtatagttattgtgccattctcaatagttcgtacagtgagtatttcttttgcgatcctgcccctctttcgagttcaagtctaaatgcctttctcttcttttcgtgaatatagcaaccggcgatgactacaccaccggcagcgacagcgaggctatcagctcttcacaatgcttgtctcttaatgctaccgagcccagcactgtctcgaactgcaactgctttacggggatctatagctatcaaagtggaggtatggaagaattgggaagagtgaaagataatcgcatacaagcatgctaatcatctctagactatgaatgcgctaatatcgcggatgattttgacatcaccgaggctgaactcatcgcttggaacccctggctggcgaccgactgcgacgcgaatctgtacgcaaacctcgccagtggtgatatgcgtgccgtctgtattggagtgaactccaccgtgtctgcaactaccactaaccccagcactgctagtgctactgctactacatcggcagtaccgacacagactggatatattgatggatgccaggagttctataccgtagagtctggtgacgattgttcgaccatggaggctgaatttggagttacccttgcgcaactttatgcttggaatcctagcagtaagaccccatcccatattgacctctcctgatgtccaggaacctaaggctaacttaaactacagttggaagcacatgtacaggcctctggcttggatatgcctactgtgtaaagggtcccgcggccacagcaagtaccacagctagtgcacccacacagactggcattgtgtccaactgcaacgaatatcacactgttgtttctggggactcgtgtgcggcggttgaaagtgagtacggggtcacctttgcgcagctgtatgagtggaacccggccatcgggtcagactgtgaatatttgaatgttggctatgctatttgtgttggcgtttcataaacacaaagaaagccgttggaggggaaaagaacatgtaagtagatgtaaagaacagaatactattgcctacgtacattcttctctcgtaaatagtagtctaccggttaggatgactacatcttttcccgcttcttcctctctcctcaagaattaaaaccaatagccggtggccgttgatactcgaggtcccaatccgactcattgcgcatagtcgtagaggctacaatctgggctcgatcatagtgaaccttcatccagcccacatcttcccgcgtacagccgtacaatggctcatactcatcatcttcttcctccccctcaggaatttctggggcccaccgcccatttatcatcaccacaaacccagtagtattcaactcgtccaattcatcctccggaatatccaacacggagcgcactgcatcctcatcaaccaagatacaaagccggtatcgggctccatacgcccactccgcacggtcataggttaccccttgctccgtctcacaggccgtcctcgcccactcattaaaagcgtctcgtatctgagcgggtgtcgcttcatcaaactgaatcttatcctcgatcacagtaggccggaacgagtcccacatatcgagaccttcatagtattctagtgtccggcggacctggcccaggaatcggcggaggaactcttcccagtccgagtcgcttttgtaagtggttcggtatattgcgataccccaggacttgaatccgtcatcttgcatgtttatctcgatgaggtcggcttcattgaaggtaactgggtaccctggggttcttttggaatctttgatcaccatagttggtgatgtggacgaaaatggtcgaatgggcaattgaaattggagtgcaagattttgatggggccccctttttttgccggatcgtgctgctgtgttgtgccttggcacgaggatgggttgtccagtagtggatagagataaagagacgatgcttgagagagtcctgcgggcactagattgaaatgcgggtcttttcagaagacttctagccctgatagagatcattgaggacattgcatgatttttgatttagtaggaagtaattcagatataagagtcgggagaatcgcggtttaaaattcaaagtaaacagcgaatggtcctgatgtttagagtctagaccaaacttggatggccatccttcggatttgatatacccctcaatgtgggactggccagttggcagagatccacgtaatgaacaagccactcaactcatctgttcaaatatgcaacctttcctaatttttgagtggaatcgacaacctcatcgcagaattgtgcgagattgaagcatctgagctcacagaggaatcttttcatcacatccgacaggattaacaagcagtcccgcagtgtggccagactaatctctcattcatctccatacaccactcatcctacgccactgctttgccactaaggcgtcaaagcgctacaaattggctatctgcccccaaaatctcgatgtctttggggttcaatgccaatgtctcggcacagcagctggtcgacattttgccagttggaattgccatactcgatcaccactacaaggcaatctccgcgagcagccgtttccaggagctgattccatgccctgaatctgattccgcaaatgctggctacaatcagttaatccagatgatcatgaacgtgcgattgccgcgttgcgagatgcttcggaagatggggaaacgctacgcattgaatatcgcacctccgacccggcatccgtttggtgcgccatgactctagagaagctacagcacacagatgtccagtcctttaggctgaatgaacacggtggattcgtctgtacagtcaccgacataacatccgctaaacgggctgagatcgtagtaatctacgtcaccgccatctgcggcttcttttccacggcgcatcacaaccggacgaggtcgagggcaatttttatttaacgggagtcattgcgctttttgaagtaagcagttacctgattgtttctttcaattaacgtcaggcaggctgtcataagacagagatggacacaagacaaagatagacacaagacaaagatagacacaagacaaagatagacacaagacaaagatagacacaagacaaagatagacacaagacaaagatagacacaagacaaagatagacacaagacaaagatagacacaagacaaagatagacacaagacaaagatagacacaagacaaagatagacacaagacaaagatagacacaagacaaagatagacacaagacaaagatagacacaagacaaagatagacacaagacaaagtgtcatctactaaagccaatcgatacagttgatagcgaaaatggatttaggtctagacaaatcgaaatatggcatagagattcaccgtgctacgtatcggttggcggcaaatgattggcgagtaggtaccccttgtactcggtcgaatccattgtcgatgatattagcccctgctatgcgtgaacgatattattctggtatggcgagagctttgaagtgacaagttgagtttcccttgactaaatttgttctgtcaagaaaaatcttcttaacattttaacagaagacttgcttttccattaagggtgtgatttataaaactgatcaattgttcaaagatgatgtaccattgattcgatgagcggtactccaaagtggagcaaagagtagcagcgtggagccaatcagatgtacaactttatgcaaaaacgggttacccctcagattgagatcccgcatggcttgattcattttgacgacgacctaatattcctaagctctgcatgagtgggcatctgttatgtacctgcgctcttgcaaccgctggttcagagtcatatcgacgacgaagcaaattcgcttgggtgaaccctccccccctccccttcgtcccccataaagcagcatcgtttgaatttatacctcttggttctttgatggtttctttactggggatatcagcgcaagctggggtgtgaacgagtggtttgtatactcgaccgtagtaaatccagtggaattggagctagtcaacctcatcttgaagctttttgatctccaagacccttccagtcgcagccaagccgtcatgtatcgattgaacaggcgcctagagtatgagtgtatcatgcccagaatcctcgcattcatcaggatcatatgatgatcgaacagtatcctcagggcttcgccagtgccgtcgataatagttaccaatgattcattgccgggtatctttcttctcagtctcataaaagcgatggcagtcgagaggcactgaccctcgtgccaattataacagtttgggcaaatgagtatttctatctggtcctcagtaaccataccaattccatttttgatctcattataattaatctttctatcttgggtgtccatacacctacaagatacacgcggcctttgaacaaaattcactcgagatctgctacaagtcagcccttggtataaacattgaccgaagataaacattgttagaccaaagccatttttgagggtggtacgtcttgcactcgagatttcaggtcaattttcctgaagaacttaacccaagatacttaaacacccaaggttcgtctggaaaacgaaagtagaaccaaacttttcaattgaaattctaatggattacgcgaatccgttcgcagattttctagtcgacatctgtggagaactggcagatctacctaaatcttccacttcctccatggctatatacattggctagctaggccggttgtcgacgaaacccgttcttttccctttacgttgaaaatgcgcttttgtgtcacatattggacgaaacgcaacaagcttggctaaatacgtccagaatcagacaacttacaatagttttctctttgtgcgactaccacaacttggtgtaaaagacgccctgcgggcacttaacggcgactgaatgtcgtgcttgtggatcttgatattttgggcattttaaagttgccagaggcttcgcctattcaaccatcttccaatgctcctggccataaaacgatgctactttcactattccctaaggtccagcggtaaagagagcaagtattggacgagaagtgctgttgttgaaactactctaaccttgtgattgtggatacagcgggccagcgcttatattatcccgtccagcgctagaagctttgattggtctggctaggtcccccacttcttcacctcgctgcctggcatgtccggcggcaacatgtttcttctctggaccttactgtcgtttcaagaactcccttttactagaaatcgataggctctcagtctgcttcgattccgctactctcgaagactgagtcttcctatcaccgccgagaccctgcttcacctgtttatctcgatgacgcccgaggggtttgaaggcgaggccggccttcacaattcaagccacaacacagcgaggatcatttccgactctagctttttcagggaacaccaggcgtctacgctccctactccggtatagaggagcctataaagccgaggaatgtatactggcctgcgagtcttttaattctcaattttatgctggaccttcgcgaattgatgctcaaccgaccgggtaaaactgcgaagtacaacgagtaaatcattgtttgaagcatggaggctactcttaagtagccaatgcgcactttctgtacgagaagtagcgagttcgttgaggtgaagatattgtgaagtgtagcaatgaaggaaatgttcttggcagtcgtcgatccattctttttggatgtgttcgagaagagggaggaagaggggaggtgtatatcgctctttgaaatcgctccattgtcggtccttctcttcaaacgtaacggcatatacaactcggtttcaccgctgaagcatcttcttccacccctcttcggctttctcacggtcttcctgggcttcagcgggggtaaggcggtacgaagagttatctccacgggcttctcggcgggcttgtgctacttgatcggcgagaagggggcggggtttcttcaaaatgttcatattaatgtgccaggtgcatgttatatgctttgtatctgggaaaatgaactcaattgcagttagcaaagctgcctctttatccgtgaggattgaacgtggggctgcaagaccaagggcctcgtaggcttccagaagacagccaagcattgccttgtacgtatggtctttctcatctcgcataaatgcaaaagcaaggtggaacgtagagccagtagccgcaaagccaacaacatcaagcagggggaggccatatcggttggtcttacatgtacagtccatggagataaccatgggttcttttgaagcattgagatactctcatacttgaatatcaacttattatttttgggaagttctatcaataacgcttggagaggagtacatccagcaagaaagagctggtgtagcttgcgacgcgtattgtagatatcctgggaatgaggatagtgtcgggatcggtctcacgtagctcggtaagaatctctttgcttgtacggccttgctgaattgcattggctactacagccttcttatgggtaagatcgagagcgcgttggatagggtgaggcgatgctggtgagggctgacggttgtgggtagggatctcaacggtaagatgtcaaagacaagtcccaatgactagccgaacagccatctgaaaggggtatccgaggcgtagtgttgtaattctccggcattttcggggtatgggctcattctcgtcgtcttcattggtattctcctcatgggagcacgcagcttctaagtactgggcacctttagctaatatcggaattcagcacagctcgataacaattaatattcgataatcaatcatcaagaccctagtatctagctactctctacattcactgggactccctgttggttacattacatggcattgaatatgacgacaaatcatctcactaaatcgatattaaataacgaaaacggaggatgtgactaacttggttaaatcaaatttatattacttaatgttagtaataaatatttcgccatctagttggaatgaccttagtggtatgttagaaaaaattggaattggtaaaaaggataaaaataatatggagacgagtattgctataaatgcaataaactaacgcaaggcgaatttatattcgagttactggctatctgacccttttgattaattgtttagatcgtcttggtttagggtaaacgccgttagtatttgaaagtttgcgtttagctgactatctgctataagagctataaggtggttcactcgtaatacattttgtggtactatatagtatttcctgcgtctgagattaatctgttatcgagtaggtgtctggtatactataaaccggatagttattgtctttatatttctttcgattagtttctagtaaaggttaacgaaaagtatattaagagctaagggctataatatacccgcttggctagtttgactatagagagtaatagagtgatcttctattaccttaggcactctgtccttagttactttattatctaggtagggacaattctgtttaaggattcgaggctcttctagatccttataggctagctatagggatagagtagaaatagaattaatatctgtatacttgtctactagggctggaaagcttttattaattaatctctcctagaattctagtatagctataatcttagtatcggtattagaactaagctactctgccttattatagctataatccttactaatataaatcactatagggttagaagctgagcctaaaggagtaggattatctctaatcactataggattagccttagtgcctaacttagaagaattgataagtttatatataactagtataggcctatccgaatgcttattagagtttgatacttcgtaatactaagttagcaaaatctataatactttaagaatatcccttactgaaggtattgtatatattatttataaaagagcttatactaactagaactagaagtagaggtagaaataaatgcttaataattgatatagggtaagactaagggctataattaaaatcaaagacctaatccaattcttaactgttactatcggagaaatagtatataagatatatagctttatatctcttgtctagcggattataccttatttagcctataggctaaagcgggtacctttatctaggtcttaactttagaccgtaaggcctagtaggatcgcttctagataaggcctatctgctaatcgtctctatgtctaatatatattatataggaatactatacgaataaccagcttattatctatttaatctaataatatcacaaagcgctattactatttacggaggactgcactcctacttatcgactgcgcctagtaacgtcgccaccgtttcgattaagctctgtgtgccagtcgttctatagcctaggatagaagacgaaatatgtaagacggacgaatatagagactaaggacccccttatcatccctagtccgcgcgacgtagatactataggagtaaatcctattttcttattagtccacttcgccctctataccacttgatcatgaagctaacgaggatttcggtcacagagcgccttcggtgacaggggttaggactgcgaagatctccggaataaggacgaccacgaccccgagatgataccataataatgctactattcctggagaactgcaagtacgcgcatcgtctgcgcccaatgtcattaccactggattgattgagctctgctcgccagtcgttccataactcgagacaaaagacaaaacgcggaagagcggaccaacatggagacacacgctacctccatctccagtccgcatgacctgttccttgtccttctatctggtcctctgtgccaatcgatcgtgaagtcaatgagttcggtcataaggcgtccagtcaattgagctttacttgccagtcattccgtaaccaatggctgtgaatgagacgcttatgaggtactgaccgagaaatcaaagctgcctaatcgcctccagtcctatatgtagcttgtgttaaaggattcaccccctgttgttttatccgtccatctcagtatgtctgctaatggataaccacgtcaaaggggtggtcaaggacaaggcgtacttggcgagctgagttctactcgactatttctgaaactagaacgatggtatgaaggatggagaggaactggggcgtgcaaacggtctggggaggtcggcgagcgatttcagagatcattgaagcgcctcaatatggccgctgtggaagcttcatattatgaagagcagggaaaggaggggatcatgttatccagctttagcagacgcttgtatcgttggcttacgtgaattgctgggaggagcgtccggtcgaatatgcaactgatgcgttttaaccgacattcccctcggttcgaaattgattggataccatcagccacaaggctctcagtctcgtactgggccccaaggcagattcacggacccgctgcacataggcgattgtccacagagggcctagggcgactgaaaccaaagggcgcaatggatcgacgacggaccggccgactgacatgtgaggacggatctgccggtcggcgtggcggaccaagggcaaaaatgcctcatcccgagcgtaatggcgagggctgagagggaacggggcagggcggaggaagcagcgctgattgcgctccaggggtcggaggaccgcaaaggactggctagttcacgccggcgatagcggggagtggcggagctcggtgaaccggatcaatggcaaaaatgcctcatctgcaaggctcgcatggcgggcgggtcggggggcgggagaaaggaggagcaggagagccaaaaagttgaaggggcgatgggggaggactttatagaaccacgcacgacgacgcacagggcgctataacgctagaccgaaaaggccagcgctaggcctaataacgtaatttgcggaaggaatttcaagcatccgatatggtgtagtggctaacatcgccgtctctcacacggcagccgggggttcgattccccctatcggagtttctttttgctttttgttctgtttcccttcgctcttgtctttttgattattttctacaggaacgtaatggtaaagaatcgtttacatttcaatttatgcgtgccattgttatcccgtaaggttcctccaatcttaggttcaccgccctcgatatcgcgacaggaccgcaatctggacccttgaactttttggaagatccatggatgtgacgcgatgcctatttgcatcgagtgctcctatccagtctctcacctgtacagcgcctacagtcgtgctgatgaccggtcccaaggcaagggcgtgcgactgacgcaatgtccccggtgccagcggtttgccgataaatacgttgaatatgactttgtcgtgctcttcattgatttggtgctcattaagccccaggtaggcattatacatgttctcggtacgaccaggctgacttatctggaaacaggtataccgacatctcctcttcaatcggctcgggcgagacgacaacaaattcaatgtgggtataccatctcaaacaattgtgagctacgtactgataatgtgacctttcagcggtccatcattcgcctcggagttcttctgcttctcttcgacgtctacctgacctgggcacgcatcgagaaggacccatccctcgcaacaaccttcctgtcacgcgcccctatcatcgtccagtacctcttcttcctaagcttgaatgcagccgcaaccctagctcaccacctcaccgtgcgccttttggcctcaatgctcgttccaaagtcgcgccaatacagcggaccagacagcagcaatgccaacaccaatcctagcacaaagtctactggagatgccaccccttccgctcccccaacgccaacaacgcatccctcgccatccggagtctcaatacacccgcacgcccagaactccgccaacccccccgcaagcctgctaaacccaaacccaaccccaacccctagctcatatagcgaggtcacctccccaacagacctatccccactaccgcaaggtacatcaatgggaccatcacctttacccgcgccgcccctgcgccgggcatcaacagccccgctgcagaacattcagcccctaccccctccaacagccgcaagcccagcagcgatcagcaccgctctgctcgtcagcagctgcgcaaagctcttcccaatcctgctagtaatctggggcgctgacggtagcggcaacctctccgatatcccagcgcacagccatacagcagcacagatccggtccgcgacgcagtcggctatggtttcgagcgcggtgcatcagagcctgttcgccacagccacggaaacgtcttccctgtgcgcgacagcggctatgtcaagtccgccgtcggctgcagttagttcttcttcgtttctggaatcgtggcttggtgtcacggcttcttcgcttcggacttctacgccgactagttatctgacagggctttttgacttgcttgcttcattgctttctcttggtgtggttgatgcgcacctggtgctgctgagtaatatcgaggccttgtatatcttgcttggttgtgggtatttgcgtgctgttgctgttgctgttgcgggccagatcgcccggtgggcggtgcagagggtgattctgggtgctgtgggagttggttaacggagtgattttgatgaatacttaggtacttgatatgaaaactaatttcacctagctttcctagcgtccatgttgcttagggtactctacggcgtaaatcaatcggtcgacctcaccgattagtacatagatatagtcgtaggcagtattggactagtaaaatgacctaaaagggtatgaatgctttccatacaaaaagaaaccggccaactgaacaaaactgaatcaaaacaaaagcatacacataaaacactgccaagaaaaggacatatagggaaagctatacaaaagcatgaagcagctacgaactcacacaggttcgcaatacagaccaagcacacggacagagaacgagaagcagccttcattcccctctaacccaggcgcctcgcagcgcgggatgagatatatctaacatcatcttataatatcccatgacaagaggagacaatatctcacaaccgacagtctccaaagtgtcagttgacagcattgacgaaaaacgcaagaaaccaagggaaatgcctttattgcggtacgcgatcaggtctgatgtctgaccgctttggtgcgatgagagggtgccattgtgagaggaagacgattgctatattgattatgttagtatctacacagatcatagagatatgtggttagagagcatgggtaagaagaaacgtaccccacatcaaataacaagaaacgaaggtaaggatgagcgtgctgcggaagaggctaaggaaagcagagtcagtattctcaattgcttgcaattttgaaaggaagggccgctgggctcgcccagtatgcaaagagggaagcatagactcacgtctgattatcgcccttcgggctcaggaaccacgctgctgtcgagagggcgacaatgataaccaggccaattaacaagctccagctgttgaagtttgtgttagcgactatagtcttttatcgagtagagtatccgggggtcggcgcgtggcgggatagatcgaacaatgcgaacacccttaagcaagtaatcatcgatccattgctcgagatagatatgcattgtttatcccatcactccgacagagggaaaacatacccgtttgccattttgtcggtatttgttattatcttcgttcgtcggagtaaagtacagcccaagtggagatcactcggtatgttatgcgattgtcggtgtgggcgaagagcgggcgagctagggaggagaccgcagaggaggcggatcgtttacttgatggtataaattctgcgcacgagtgctcttgaatgtccggatcttttgacagcgcgggtagacggacaagtaatcgattgctcggtgcagcgtggcacgattaggatcgacttgatggtatttcggggacgtgttcaagaaaccaagtatccgggagtccttcttgggaaagacgtagctgttaggtatgttgcgagctaataaaaggcgacctggtgagttggagtatctccgttgatgtcggagctcctggagctagcatgcctgaggcagaattggcgggcggtggaccatacgacatctatacagcaatgaagacatctgttctactccgtacatttccctacaatatgaaatttatgagaatacatataggagcttcttctaggtccaaaaatacagactgaatgatctgttgcttgggctcagctgaagcaaagcggcttaggtacaaaacacaaggccatggctcgggataacagacaaaatcgaagccggacagaaggataacaaaagaaacatggcattcaaaacaacacttaagcaccctcacggatcttgcggtagctggcctaagaaaaaaaaaaacgtggttagatgtgatagacatgtagaaggagcatcaccgagaacttacctcctgctcgacctgcagtgcatctacggttggagcaagctcactgagaatctcatatgatttcttgtggaactcgagctgagcggcgatcagatcggccaggttgcgcaggggctcgggggtatcaaggaccttgttacaagcaatgtgagtaccactggacagatttcagaacacaaacagaagatcaaccagcacttacatttttcataacgctcacagcctcctcagtctggccaacaaactcatcttcggcctgctcgatctccgcgcgggcatcctcgctcaggttatccaggtcgccgtgggcgccggcctttttgctagccttgatggagtcgagcatcaagcgggcattctcaacattcttgcgcgccttagcagcgaacatcaagttagtgttgagggtggtattccagccggctaggaagcgagactggatctgagcatcctgggctagacgagcctcgcccacctgctcctcggctagagcatacttctccaacgcagtggcgagtgggtcttcgccctcggtgctctgtgcgagtgtctgggagccggcaagggaggcacgggcgatcgcgtggttgaaggtcttgggttggggctttgcggaaggcggggctgtcagggcagcttgtgcctcagcaggcgaagctgcctgggacaggagctggactttctcgctgatcgtgcggcccaggtcattgaaggattcgcggatgtttggagggtagtcgtaggcctcattagagtattgggagctgctcgcgagagatggcaccggttagcaccagtgcggagagccatccacagcgcagaaagcaacaggaattactcacgtcacctgcaacagcttctggtggacaagcttgagcgcatcaacgcgcttctcgagctcgatgtattcatcagggagctgggtcttgtcgtcggcctggcccagctgctccttgatcatttgctgagttcgctgcgcaaaaggtgtgaaactcgcactgtccgtcagaaaaccaaaaggcaagaagatgttagcaaagcgaccaagcacaagtcgagggggatggaatgaggtccgcgggataggggggctatgacggtgtactcacctgaagttctttccgaatgcctgcattcgatccatgattggtatatttttaaacgttttagttagaaagaaaaaggaggagagaatggcgagaaacggatgcgtgtgttgatgggatattaccacatgtgctacgcgggcaggatgaagcctcgaccttgcaccgcctcatttacgccacttctcatcaggcactatcaggcaccttcctttttccacctttatactagacattgaaatccatgtcaaatccatgtttcctctaaaagcagccctctgtaagtatcgagtgtttggaatttcaatattgtacttggagatggtctgcaaattgctaaaagatacatagagaacatccggaaatccccattcagaacccagaaccactgagtcaaattaaaatcataacatcgtaactcgctggttcaaaagcaaagcatgaaagcatgaaagcattacgcaaattaggttaggtcagagtggccatcatagcacgcatgatgcgggagttgggttctagagaatgtcagaatcaccgaaggggtatgtatagtaatctgtggcgtcgtacctgagcgctcctgcctccggacctcagtaacctcctcctggttgcctctttcgtcaatgatatctgtttcgcgttgccgagtgatctcaatcccaccctgcctctctatacgaagaagtcttgtctcctcttccagattgcgaatgtactcattcacgtcgtcatcgctgtcccgtggacgaacgacaaccatcgagctcgtacgaggactatccaattcccgctcttcgatgtactcaacgggagacaagatacggggtccgcggtcatggactgatacagctcgtcgccgagagatccctcgcctgcgcggcctctcgacaatctcctcgtactcatctgcatagtggcgtgaccgtgacctgtgtcgggagggtgatgcttccacgatgaatgcctggctcgtgcggggagaagcatcaacacgcaagtgttctgtcgtcacccgctcgcgtgtacgttcccttagcggaggagatggagcaaattcgacatattcggctgttcgaaaaaaaaggccaattagtatgatcttcctcatacacttggggatccggatacgcatgtatatgccactcaccttccacggacggaggccgcctgaactcgcggctcaagctaagaacttcgtcgatttgttccttcgacaatgccttttgaatgacgatcacatcatcctacctaggtcagcagccgacaacagcactatcggaaatcaaacaccaacctcttccttgaacgggtaccctagatccatgatggcgtgaatatgagcaaggtgacgaggaacacgggtcttccctttgcgtgggtaaggtttctcctcatgatgtctgcgaagggtactgctagaccggcggcgacgatcaaccatatctcgctcactgatatctctaaattcttcatcaccatagtagtcgggttcggcgatccttatatcttcgtagacttcccgttcgcgataacggcccggagaggggaggtgacgaggcggagcaacgagaggtacacggggagcgcggggtccaacatctcgggcatcaaagtgttccatattgcgccttggtatgcggtcaaaggtatccaaagacgactgccgcctaagaagttgaggacgactgaatgagggactatcgtcaccgcgccgacgccggtcatgcgccacaagagacatggaaggcggttggtgatctagatggtcatcctcatagagtctcccgggtgcacgagcagggggtccatatcgatcttcctcgtggaggcgtgattcaaagcgctcttcgacatggcggggtcgttcggccacgggggggccccgtgagtatcgatcatatcgatcgcgagagttcagtgtccccgttgacgagcggtagtcatcatagcgagacatctgagaaaacacagcaaggatgaaccgtggatgacgcgagcggctgacttccgtgccgagggtggggtaattcgagtaaccacgggtgaagagagacctcgtgagaatgataggaagagagagaaagatagaaatgagccgagaggcagcaatgaggagagagaaactgaaaacagaaatcaagaatcagccttgggagagaagaagaagtaagataaataaaacgtcaggcagaagtcgatcagtgatgacattgggtcggatgttgattgcatgtggggatacccggacacctatttgcgccacatgtttggacaaagtacgggcactactgtatgatgcgactgtatgttgcgcttcatgtatgtactatgtatgtagacacggatgcattgtgtagttgatccaatcctaaagctccaaattcgcaatgtcctcttccaagatgcccatagcccaatgcgctcggtccgacttgactggcacaaaccgacgatcttttacctcatgcagcaccgcctcagactgtggcgcatacattagcttggatgttgagggccaaggatatccaatagatgtactcacctgacgctcctgttccctttcccgatctcggtcagtcttgaatgactgttgatagggtggcccacggccttgcttggcagcggctatccaagctttctcacagccaccggcgatagcgtctgcgctcttccacccggtcaggcgggagatgtcacgaagtgttgaaatcgtccaagctcgctgcgtgggatcactatattgcacagctgcgaagaatagcggcaccgacatgtcagtcaacgaagagcccagattcggattcaagcttccggcttcgaggttaaaacgttgcgggtagtagacacccgccagaatcttcccaacaatctgcgaaaattcagctgtcgtgggagcagagactccagctgcgaccatgatagccggtggcatagaaggatgaatccggttcagcagcaggcgcatggcataatagaacccccagatcacggcgatggtatgggtacggtattggagggcaggaccgaacggtgtagatattgggggcgcgacgtctgttggtaaaggctggaaatcgcggcccagcgcttggtatagtatttccatggcgacgaggatctcttcccattcttgttcggcttcgttgtaactcacgtcgtgagcggggtcatcctcgtccggtgacaaacgaggctcacgcggtgtattttcgaatccccggggaagacgtgcaggcggttgagggggtatcattccgtacatggggggactaggggccgaggtcgatccagggcttgaagaaggagacatctcagtaggtgggccaggtggagggccaggtggagggccaggtggagggccaggtggacggccaggtggaccccctggaccgagtccgccagatgagccaggtctttggccgggagggccgccagcgaaccgacccatgaatttaaacatcccaggacctggcctccagttcaccccgcctgccttcagggttctcaattttcgcttacggtcacggaagccaaagtctgtgacccgagcgagcagcagccacagatgatctgcggagccgtatatggcatctaaacggccaatacctgctcgaggtgggcattggccccattgagagtaaggcattctggtttaccgatgagaaaatcgcctgtctagtagccaaaggtgtagacttacaataatttgtttccgccgataaaactctggaatgcatcttgcttcgcgtaccaccagtatagatcgcattgaatccggaaaacctcaatgtccttgcgggtgaaatgcttcttggagggcagcgtaccctcttcattgatacctccaaaatcgtcgtaattcactgcttgtcccataatggcgcctatgagatcttcgtcgatgctttcctctttctcggagaagggatcgtcttcagagacaccagacatcccccaccacgagttcgaccagcctgactggcgtcgctgctcgtgagatctacgtcgataggcccgtagatctctcgtggtcttggcgaaatcgatctctcggatcaaatgggtggacccacccaggtggttattccatttcgagtggtcggcagatatcacctcatagtagcccagtagaagagtggcagccaaggtaccgacttgtttgcgtcggagaggaagaccaactgcggaactaactcgtttcagggcgtagtgatagtgcttcaaagatactgtcgtgggagcttgctgtaaataggcaatgtgtaagctgctgacagccagtattgcctgtaggagagctggatgctctaaagctttgagggcaagcgtatagacccatagaccctgctgtgcagatgggacagccgctcccagaacaattgaggagtcagtaggatgccgttcaaatatagacaaggatggaccagtcgaatgaatgaagtgagcaaagatgcgggcagtctttgggttgttcagcggagaagagccaagtgtaggacggtatgaggcaagcacattgggctcgttcaggtgagtcgtgaaggatcgaagttgttgctcgtcgcggttagcagaggccataatgagactcagctggttgaagccttcggcctgcgattgatccaccatctcatcatccgagtccacgtcgtagtaatcctcgctttcatcctccatgtatatcatttgttgttgatggggtatttgatagggtatatattgctcatgagatcgtaattgctgcggtaattgccccagcggtggctgataatgatatatcgtcggtagcggctgggtcatctaagaaatcgtactcagcataccagttgctaaagacagagataatgacaatacatacctgaggaactaggttggtctcgctctccctccttccatgcatcgagctggaagctagcatgggcgagagattggaggcgtattcttcagctgtctggccgatcggactggcgatctggggtacattttgtacgcttgcatgggaagtatgtagagcgcttgtctggtctaactgaactgattgctgtccttgcgagaagtcagtcacatttggcggaactagcgtgttttccgtttgagctatcggctggatgtgccacatatggctcggtggctgcacatgagctggataatagaaggagggtgtattaatgggctgtagttgagccgacgaatgcatttgggacggaaatgagggatatcccatcacggctggatcagcaggtcgaggggctagcattggatgctgagcagcagctgccgcttgttggggagggagttcagagccatagtcgttgggcatcggccccctcatatgttgttggtctatctgcaaatcgtggctgtggccattattgaatgatccgaagaggcctatggggttcttgaacacgacccgctgggcatatccctcgcagattcgcttggatttcacgcagttggtacatattggcttctcttcgccgcacttaatccggcgctttcgacaagctatgcttcgtcaatgagggaaccctatcaccagtgttctgcaacatactcaaacagccagtcttggttcgttttttcgggagtctgcggggaccttgtccggttgaggttcccgcagaaccgccaacagtaagatctgctggaatatccagctgatccttcaggtcgtcagccataaccttggaaggactcaagattgcggagtggacatgtgcgaggacattgtggggctaaaagacacaataatcagataagtaagaaacagagctaggagggaaaagctgccgagcaacgcagatcacccgcgatacaatgtggttcatcaaggggggatatacatatttgcaaggttgctcttaacacggtcagactgctaagtgtccacggatattgacatttataattacaacttacgagacgcttaggggcgtacaacgttgtctttgtggcccaagaaagtcacactatcggcatacatcagtgcctgaggcaccaatgtgtatgtaatctgatagtaaaattaccgataacgaaattttgagagtttttttttggaggtaccgtttcccctaccttaaaaggcattggacatttacaaccaatccttcggaactaactatgttcgctgttccaggatggtccgttgagagctctgctctgaagtcacagactcaagccgcacagcctaagaacgactctcagccggagaagaatgcctccaacgatgcgaagaacaataaacgcaagcgtgccaatgaccgtatcactgcgggaaatgtggatgagatgtaccgtagacacatcgagggtacctccaggagtggaaagcatggtgcagatgattctgtgaagccagagaagaagcagaacaaggaaaagaagcagaaacagacacttgagactgccacccaggagactacaagtgaaactgccaccaccgccgatgccgatgccgatgcagatcaagccgaggataaagcacccaagaagaagcaaaggaggaacaggaagaacaaggacaacaaggacaacgcagaggacaagatcgaggcagacggcgctaccactaccccagctaaagaagctcctgccgctgctcctgctcctgctcccgctgcacccgcactcccaccaacatcgaacctgactcctctccagcaggcgatgcgacaaaagctgatctcctctcggttccgccacctgaacgaaactctctacaccaccccctccgcgaaagcacttgaaatgttcagtaccaacccggagctgttcgacgagtatcatgccggattcgcacgacaggtgaaagagtcctggccctccaacccggtcgatgactacatcaagactatccgcacccgcggtgcaatccccctcccaaggcgaggaaatcccattaaccctgctaagggctacccgctccctcgtcgtcctactggactatgcacattcgccgatctgggctgcggtgatgcacaacttgcgcgcgccttgacgccctccgccaagaagctgaaaatcaagcttaacagctacgatctagcagcgcccgatccactgatcaccaaagccgatatctcgaatcttcctttggaagatggggcggcggatgtggctattttctgtctaagtctgatgggaaccaactgggtttcgttcgtcgaggaggcatggcgtattttgcgtggtgatggcaagggcgagtgctgggtcagtgaggtcaaaagtcgatttggaaaggtccaacgcaagaagtctcagatcggtgcgatgaagcccggcagcaaggcagacaagaagaagcccaagaagaagggcggcgccgattctgatgacgatgaggctgatatttttgctgaggatgcgcgaccgtctgacaatagcgatgagactgatatctcggcgtttgtggaggtgttccggtctcgtgggttcatgcttcgccaggaatccgtggataagtccaataagatgttcgtgagaatggtgtttgttaagcagggtggtgcgcctaccaagggtaaacacgcttcggctctcactgcgcctgcccctggtaacaagaagcgctttgtcgaccgcaagcctgattcagagtctggcatgtcggccgaacaggaagcccaggtgctgaagccttgtgtttataagatccgctagacgttgcaccggatctttttatatgtcattgtacataaccaaaatctaccacacatgaccactatgtttgtggatcatatcccgaatgcaacatacgacgtagttagaccagcatgtaagcgttggatggcatcgtcattatttttctattgctcccgacataaatactagcctccaaatcaagtccaaggagcctcttcgaagatatcttagacactgatcgcccttattggttcccaccgagctgtgtgacagcttggcccatctcctcatcgttgtagatacggaaacccttctccttggtgacactggccaactggacgttcttggaatcaagcttctcctccatgacctgcttcagtgtcttgagtaccaacgtctcggcctctgctagagtcaaagaccgatgatattcattctgcagctccgcctgcgcaccttcgcttcccgagccgatggccttggcatcataccggtagaatgtgccggacggttcagcgtggtatctagcagaaaagatgagtcagtgaatatatcatacaaaagaaagctgcatatcttacagttggggcccgtcctcgtcataaccagcgattaacagcgcaacaccaaacggtctgctcatgacactctcctcgtcatcaccgctctcaccaaatcgcagagccaaatcgcaaattgcctgcgtagtgctctcgacccgcagaggctcggcatagtggaaggcgtggttttggcactcgactcgggcgtgctcgactaggttgcgggcatcggcttgcagaccggacatggcacagccgatgtgctggtcaatttcaacgatcttctcgacggacgacgcttcgagcagcgtggatgtgacgcgcttctcaacaccgagaatcacgccctcggaggttgctacctagatgagtattagaaaaaacggtttcataatcgcattatcctgggtcttgcgctccgataacagtacaaagatcactcggtgtagtggtttgaggactttcttgaaatcgtagagcaaagaggaactgagttgtatgacatactccgatcgcggtggagcctagtttgatagcttcaagagagtattcgacctggaacaaacgaccttcgggggagaaggtgctgcggaggggacattgtcagactgcgggtcggtataagagcgcggattgttatcggagaacgtacttgattccacggtctgtccatagctgttagttgattccgcggtgaggggagaccctgatgaagcttaccatattctgatcgtgcaatgaacatattggattatctgatgggatgggagagacttgtcaaaaagagaagcaatgaagcaatatagaatcacgatggaggagataatcagttggaacgaaagaggagcagaggtggatgtcttaagtgaagctcgggaagggaagctctcgacgtacgcaagaggtgaggtgcctggttgatgcctttgtgcctgaggcaattatcggcccaaaccaaatgtggagttgtttggatacttgcatcttctcctcatatacattggttctgctatttttgttgctgatttttcgatctcgcgcctttcagtcgcctatgctgcatgattcaattgtcgccctcgcgggattatgtctgccaatgaccgcgccgcgtatatgaacgcttcacgaccccgcgcggtctccaatcgcgtcgattccgaaactcgcggagcatcgccgttacagatcgagaataaggatcccttgcgccgcagcagctcaaatcaaaaacacagagcatcccgagatcagaagagcatggccgataagcgctcagaacgcatggtaatcacatcacgggaaagggcagtgcgaaggaaccctgtgaaccctgttaaggaatctatcaatgcggctagcaggggcgattgggataaaactcggcccaggaagcctgtccaacttgatgacgggaattccagtttccgaactggggagaaagacctggctgattgtgagtgctgcgtcgcagtttctcgtggagtgcaatggatttgctgaccatgatttttctctttacagcaccatggaatccccaagcatcattgattcctcactcgacagctcccctcgcatgtcgtgtatcagttcctcctctagcttcgacggctccgcaggcccttcatcctcggccacttcgagagctctcacccgatgcccaggaggcggcgatcttggaagacttgttgttcgtgttcatgggattcgaaggtcaatatgttcactacgctagctcatacgacccatcaatcgagaaagaccgcctcacgggcccgatcttccagatagccccaggcctggacccgaccctccgtgatctcatccagtccatgttgaaaatggctactcactacagtgccatggaggcatttgtggaaattcaaagtcgcgctgagtgtggtgctgtcagtcactcactatgcgcatctattcgaaagctcctcaaagattacctgatccttatcgcccagctcgaaggccagctgctgaacaatcctacatttaccttacaccttctccatctctacacaatgcctaccagtcaatgtttatctcaattatattcgatgggccaggaactgttgctcaaaaatggtcttctagatgaggagctcgaggagtcgactgatgacttcgatgaggatgttgacaatatacttgaacaactcaaagaagggggggacttagtgccaggttctatggcccgcaagaaaatgtgcaaaggaggcaatattctcggactcctaacagggcgtctggcttcattctcgggtgatccgatcactaaaaccttgcttcagaccttactgcgtgacgccagtcggccttacatggctatgctaaacgaatggttgcaccatggcggtattagagatccccatgccgagttcttggtcaaggaacaaaaatggatcaaacgcgagaaactcgaggaagactacacggatgaatattgggagaaacgctacacgattcgcgagaacgaggttcctcctcagctgaagagcgtgcaggataaagttctgctggctggaaagtatctcaacgtggtgcgtgaatgtggtggtgtcgacgtcagcaaagaggtcaaagatgtaccgaagacgctcgacgatccacgcttcttggacaacgtaaattctgcctacacctatgccaatgcttccctgttaaatcttcttgtcacaaaaaactccctcactactcgattccgctccctgaaacattacttcttcctcgatcgctctgattttttttcctacttcctcgagcttggtgcttccgagctacgaaaaccggcacgtgccgtcaacgaagggaagctgcagtcactgttggatattgtccttcgacagcctggcagcgttgcagcactggacccgttcaaggaggatgtcaaggtgcggatgaacaagatcggcctcacgaaatggttgatgcaggttgtgaatgtttcaggcgtcaaccaagagggcgcggaagcggagaagcaacaaggttctgctgtccattccgctgatgaggacaaagatattcttggattcgatgcgcttgagctggactattcagttccattccccctatcactggtaattagccgtaaaaccgttctgcggtaccaacttattttccgccatcttctctcgctgcgccatctcgagacgttgttggtcacgtcctgggcagaccagaacaaaaccatcagctggcggcataaatcctccgatcgacggcttgaaatatggaaacggcgggcgtggaacttgcgcgcgaagatgttggtgtttgttcagcagcttttgtacttttgcacggctgaggtcattgagcccaattgggtgggtctgatggatcgtgtcaacagcgttgacgccgacgcgtcggaggtggaggaaaattatatgaagcaggtcaatcgaacggttgatgagctgatgcaagatcatgtggatttcttggatacctgtttgaaggagtgcatgctcacacaggctaaactgttgaaggtacgtttatccatgcaggcggtggtattcatactaatagctatatagatccattcgaaactggtgacttgctgcaccatgtttgcttcctggactgcggcatcactttcacgcgccttggcttcagccgatcctgacttggctggaggaaaagtccctggcgctgatgccagaggatatgatccaacgcggattggaaaactcgaggacacactgaaacgatacgaggaccatttctcgcgccatctccgcattttgatggacaggtgagttacacccttaagaaatacatctggttatgtgttctaacacgactatacagcttgaactacttcgccgcaacggagagtgtggtgctcctgaagcttgcacattctttgacctctattagccgagaggagagtaaagaggattgaaagcttgcaatgccttgctccgtgtctttcacaccttgatatcattatccccatatcaacccccgacagagatgcggttgagtgctctggttatgggcacaagaagcaaagcgcttcagacccataatgcttgctcgctgccgcctagaacttggtgatgccgagacatatgccacggacttcggattgtggattttcgaactccgcagaattgagacattcaccggactctcccagacaagtccaaatgggctgtatcacactctatcaagcctcgtctgtgggttcgtggaaacccagatcactgtacttagagccatgaaccgagtcacaccagacatcgggattaatgataatacgagtagcatttcggaacgaaacccggacttacagcgtgaagtgaagtgtataacgaaatctcccaaatgacggagcccgcaaattcctcgggatcgcgtcagcaagcggcttctcacgtcagccggatttggccatccaagaccgtcagggttcttattatttaatttcaatggaatctctgagatatttgtaaccaaagagaaataattaaacacctacgggactccaacaaagccgatcgacgcaaacaccacaaacatgccaataaccaccctcacctccgtcctccgcatcccattcccgcaccccaacacagcacaagaccgcctaactttggccctcggcgccacagcgctagtcctctcgaccctcgtcctccccgccgcctaccgcgactacaaaatcttcaaatcctacggaccgggcgggccaccgaacaacgcgctaggatgggtaatcgtgcgcgcgctgttccagccattcgggcgcgaaatgttcagcacggacgagtacgtgaaacgcgttgcggcagccgatggccacgggaagggcgatgatgggtttctgtttttgtccgaggagcaactggggagtcgacggggggaagagaggcctgttgttggaccgcacgttgcaccgcagaggcagttgacgcaggtaccggataatgctgttatggaggtatgttgcgtgccccctttttttgatcagaaaagagaaggcgagggatgaagagctacttgctgattatgctcttgtgtgatagaaattccgtgctgtgttcagcgccttcgggcatcggaaccatcacctcgtgaaattccaaaagtccaatctggaacgccatgctgatgggctctttgtcgcggatcatcttcctgtattcggaattgcgaaaactatggagcgggagattgcacatgttcatactggaaatgaccactcggttcatgtgattcttgcgccagctgattgtatgattttctcgattcattcatttgttcgcgtgctaacattccttaggtatcaaggttatcgaggctggttggggccagcgtcatgctttctcgggtacatctgcgatctcgtttctttcgcttggtacaaggcctgatatcccggtggagtatgttttgatatatgcgccgcggacggaagcggagattgagacggttatgcagattatctcagcgggtgtcgagtttatgacggggagagaggatgtgcggtaggtcaacgagtgttttttggactgatcgtatacttgaagggagtaatggtggtgttctaaggtggatgcattcttcttccggtgtatgggttgtgcttggtttcttcctgttctctgtctagctttatataccctcactcttcgatttatagaaattcatgctgtttatatgagcatgtggcagcgccattgcttttaattgagactagtacattctgctgttggtgatgcatgtataagctgatgcctcaactctctctatggtatactcactccagcccaagagtgacctgcaataatgtaccttctttgccctggatgagtgctgacttagagaactaaaggtgaacacgttctttcccttttgatataatctaacctttctcatggcctatctagcttctatacaatttctcaatgtacatggtgcaaatagaaaacggaatcccccgcctctccacttttgcaagctagtagtagataaccatgtaaggcctctttgcttctgcattcgaggcgtttagaattaatcattggggcgaatgccctggaatggctctatggatatggcattgtatcatctactattgttattttggtggtaggagtatctggatatatatttgtcatatttgttatgtacactatagttatgattagatagtgaatattatgtgtagttctataccgaggaatctgccgaccgtcatgcgatattaggactatatttaacgtttttctctcctctgtgctagtatcttaaatagtaccacggcgacgcctctacccaagtggatctatagcgcgattgcacgcatatggctagtggaaccgagggagtggtcaagttcgtatttagtaggtaagaaaatacacatatccacccagcaaatgagactacgaatgataattatcttttctttcattttactactccatacgtatcattgtaaaaggaaatgtgcttggcggttgtcatgcccaatttagaatggggcaatgaacccgctaggagcaattccaaaattacccgttatttcccgacttacatccgacgtaggttccgatactttttttggggtttcggaaaaaggaaataggggggacctttgaagtacaggaatgatattgatctaagagctcccccaggttgaagccgaaaaagttagtaggtggctcccttacccgagagatgaaccatggcgctgggttttgagccaacggcggagccggacgggtaagcccttgtcgaaatcccgacagtatggatcttcgtatattgtactttgtatatgtaggaatctttcttccttgcttcgacctgaagagtctttttgacacgaacttaaatagtgctcggaccacatattcttgtatggacccgaggtataagcggcacttgcatggaagtaacgcgttgacatgtcgtcatgtaactcagtgttatgtgagaaataaccacatgcaagtcttcggaatataccccacgaccgcaactgcaactacaacatacgaaccttgcctttgttatggaccgttgctgctgccatgtgggacccgatcgcctcggataattgacctagagtgaagaaaagctagcagtacctgcacttaggcattaggccagttgaaaataatttcgaagatgttttctctcggtgaactcggacaccgaagtggatattgccgacgttgttgtgttgtgttgtatgttgtatgctgtaatgtaatattgcatactccgtatcttctcctaaaggcaacaaatatccacacacgggatgggtatctttcccgctgcccatcactcgctttgcaccaaggcaaacaaggtgaacgggtgaagaatccagaagagggcaacggtaatatcgatcccttgcctcggaggtacttctgtcatattgttctgcagaatctggagacgggctaaaaaatccctgtagcaaatctccatagtgtccgccacccgggccaacaacgttgcaatcttgaaacgcaaagcctccagacaagcggtgagagcgagagtgaaataagaggggcaggaataaaatcaataaaatccagtgtccagcccatctgaatcccgagggaatggatgccataacgaggaagttgctgatctcgtctgtcgaaccccactcaatttgaggggctgttgttggggcaatttggggcgtgagattggactgaaccagccactttacacccacagtactgcacattgggccaaggacacggggcgtggcgagtgtcagaaacccgtcaagccgttcgatccaactgttggattccttgtttgcattccttcacttaagtgacagcgggaaccgacggtgatccgtttccatgcctttggaatccgtgatgtagggctcatttggcctgtacaaagtacatacgcaagggctggtgtgaactccgatcccacgggcttttctttttgtccttgttctcagtcggctctctcagagccaattcctaaaccttttgttctccgtatggtgtctcatgtcgcactgcggctgtgttgtcattgtttcaacctaacgacgaattgttgcatagtttgcttcaatcgatgggtggctttttttttcattcttcaccgagttcttgttacattcttcgctagtcaacccctagagacccatggaatcatggcgagcagcctgagcaaggtgcgattcaactttctgtagactcgaagtttccaaggttaaccgctcatgacagccgcggaattacccacatattacccaccatgtttagcaatgcaacgattctttgacggcatggagatcccagtcttatgggtttagttgtggccggatttgtactcgatccacatcgtcgggcgctcttggaccctccaggaaagtaggtactatgcgagacggcgaactgtgcattagttgacggcaccgccacctagtttcaaggttcgttagcttggctttgagcggaaccaagtcatgtctattctgatacttacctattctggtgtcaatagtccgggattattcgtgaactcttcggctagtctaccgacccgcattttttttctttcgtcaagccttgttgacgtaccagtgtcccggagcagcaacaagagcctcccgtgaagatgtctcacgccatgtttagtagttccgctagcaaggatgtgtgttttggagttggccccaaggaacgacatgaacgatccggaggggagttgggagtccgcattgatcgtatttggttacccatgcaggacccatccgtgccaaatcttcgcccgttaagcacctcgtgtcttcacaaatccagtattgcatctggtgtgatctttaaaagaggaaattcgattgggtggaccgctggccctcccatccgcacaatttggtacgtcccttgtataattagaagcccctccattcagccttcgcgagcagacgcccaagagcgaataatcctcgcgcgagccgccatcctctccgagggtaccgccgacgtcttcaagcggcacccgatcgctccaatgaaaaccccagcacatcaatgatcaaatctcactcctttttcggatattgtgattcgaagcaagatcttgtcctcgggcaattcaaccccgccttggccagacaaatcaggatatatcagctcggatttttccatcatccacaacaccactcgattcagggtgacgatggcgtatgctagttctctccgttctttcgggccaagggcaactgacgttcatggccgccaggagtcccgattctgaaacgatagagttagaccgtgaatacctcgatacggtcacagtccagggccgtgagtatcagaaatattcgatcgatcatcgtacgtactttggaccggtcgatgaggtaagtcgtccagatttatgtcgtgggcttctcactgataggctgaaccaggaagaagcacaacgactcgaagaccagcaacaagttttccaaagaattttcgataatcgtttgatcttccccccaatccatcgactgaaaagagttctggactgtggacatggatccgcatcctgggctgtggatgttgctgagcaaaaccctgactgtgaagtaagatgtccccttgactgcgcccgacgacatcctaatatttggtgtttcataggtcatcggcgtagacattgcccctcacatgagtccagacgacatgcctgacaacttatggctccaggtaagtcaacctcacatttcaccacggggtacggtgtggtttacatcatgaaaaggcttgacactgcctttgactcatgactttgtgcttcgggacctctgtgtgatctgtcaatcttgaacaacagttctgtccaaatgtgtaacctcctgaaagacattcgctgacttgtgccgaataggtcgatgacttgaaccgccgtttcacctttcctgcaaaccatttcgatcttgtccactctagactccttgcgaccggtatcaaccgatcgcgatggccatcctatcttcttgacatagtcaggtgcgaatactccagagcaggttgaccttgccgacattccaagaggcagaatttctccaactgagataccaagactaacgtcagcggtaatcaagggtactgaagccaggaggctgggtccaaatggtggaaatatacttcaatgttcaatcagacaacggctcaatcactgatgagcatgctttgaggagatggagcacaaaatacatgcgtgctctggaggacaggaaagatcttcggatcggatcgaagctgaggactcttatgaccgaggcggggttcgtcgaggtagacacgaagatgattcctcttcctctgtctgcgtggtcgactggtcggtattggctacccaagaagaacgaataagactgattgaatcaatgcagaccaacggatgcgagaaatcggccgatacaattgtccgaacatgcagcaacttctgcgatcacttgcactatatccattgactcaacgcttgcatatgtctccagatgctttcaattctttggtggaccaagcgcagcaagaagcagcagaccccacactgaaggcatatttcccactgtaggtattgctccaatatgaaactgagagacaaattctgacagagtaggtatgtttgcattggcaggaagccatgaagacatctgtctggggagatcggcaggtgcaatggctcataaaagcaacctctggcggaagggggaaaaatgctcgcaagacaactgggccggttatcgatgccacccctcacccagcatatcgtacagctttggttattttgctgtgcgcatcctgcattaacatgtcgcattagcggaaagatggttagttgaatgagtgttttctaattccacctgttctttccttttgccgtttgtaatgcaacggggattcgtatcaataaccgtcgctgtatgctggctgaagtccagcggagagcttgagaatctcggtatgattcatcgaaagaggactgcatggtcgcacaagaacgagtgagacgactccacggcgagtggagtgagagaaagctcgtagtccaccgtggtttctgcgggaagccaacaattcgcacatgcatcgagtcttggctttaagagcctcgtatccactcgatatcggtgttggggtactgcccaacgcggtgggaaagcgaaggtgtattggatggaacacggggtcgaggcatcgctaccgctgcctagggtaagttgagcttttagttgactgctcccaggcaaaatgggagtgaaacgaaacaggagagggttttgagcaggaggcctgggggtgcagattaagctgttgagatcgtgcctagtgcgggatacccgacaccgttggctcccgatccgaccttaccctttagagaagggggttttcgacctccttacactccaaaagatacacccgatcagcaaagtttgtcacgacaaaagatgaagaacatagaggaagatgaaacaggaggggacttaccgaactgacgggagagccagggaaccaccgacttccaggaacacatgatttacacccatctcagacagtatatacggtttgactgacctcaatatcaatactagctgttaaaaatgtccataccgacttgacaattagacagcttcgcgccgtcacgccatcacgctctcaggccttcggagcagactctcatgttgagagtgataaccctgggcgacgagctccctcaagccttaatgaacatccacaacatccgttacacattaaagagctatcaatcttgtgtcttaccgatattctcaatggccgcaggagctcttataaccaacaccctcttcaccgtgtttcccgtacggatgtacccaatcataacctccaagcaaccaacaactaggaatctaagctgcatatcgggatctaactagcgctgaatccttgctgatttgttgagttccttctttccttactcgcgaagcggccatgtcgccctcttagcttcttattagagttcctcccggatgcccctggcgacgctagctcgaggagttgcggtatgttgattgccggaaagacccacagaagctcgaaatgcataagctacattctcttctcttcatgagtgtgttggggagccttgaggcgactattgggcacagatctaccgagaatcttacctatcgcagtccttccaagattctgattggtctcctccaggggctctaaggccaaatcaaccatgaaggggagaatccagactagacagcttgcagtttcgattagtaccatcaactagggaatattggtgcttggaaagactgtactagtcgatttatgccgaagacttttcttttgtctgatattcttttgtttgtctttcctgtacggagtacctgagaccaaattacccctactatatgccgataatgagtgaccaccaacttaaactactcttaaccatcgttgtaatccttatacatactccgtacgcagcagaaattagcgtacagctagctaagaggaagatactcaggcttggccccgatctagatgtgttggtgcctgaacttcaaggcatgaaatcctacccaatcggggaaagcggggagaaaaaaaagttggcgcggattttcatttgagctccggaacagtcgcccattctttttcctatcaagtcaccaccaacaagatgccttcaacacacaataaggaaaaggcctgggatacggatgacatcgataagtggaaggtaagtccaaagctgtccttcttcgattaaaaaatcgctactgacggatcctcgcaacagatcgaagaattcaaacccgaacacaatgccggaggcagtttcgccgaggagtcatccttcatgacactattccccaaataccgtgaacagtacttgaaggaagcatggccggtgatcacacgagcgctggagaagcagggcatcgcctgcacactggatttggtcgagggtagcatgacagtgaagacgacgcgaaagacctacgacccagcagcgatcatcaaatcccgggatctgatcaagctgcttgcacgaagcgtacccgtgacacaagcgatgaagatcctcgaagacggcgtggcatgcgacgtgatcaagatccgcaaccaggtgcggaacaaagagcgattcgtgaagcggcgacagcgcattctcggcccgaacggttcaaccctcaaagcgctcgagctgctcaccggcacatacatcctggtgcagggtaacaccgtggctgtgatgggtccgttcaagggactgaaggaggtgcgacgcattatcgacgactgtatggcgaacatccacccgatctaccacatcaaggagttgatgatcaagcgtgagctcgccaaggacccgacgctggcggaagagtcctgggaccggtttttgcctaacttcaagaaacgcacgctgtccaagcgccatgtgccattcaagatcaccgacaaggagaagaagacgtacacgccgttcccccctgcgccggagaagagcaaggtcgatttacagatcgagtctggagagtacttcttgtcaaaggaggccaaggagcgcgttcacaaggaggaggttgtcgagcgacagcgtctcaagcgggacgagaagatgcgcgagcgcgagaaggatttcgtggcgcccgaggaggtgacgccggccgatctcgaggaaaagaagaagaagaaggagaagaaggaaaagaaagagaagaaggaaaagaaggaaaagagcaagcggaaacgcgaggccgaggaggatgtcgacgccgacgaggctgccgagcgcaaagagaagaagaaaaagaagaagagcaagtccaaggaagtctcttccgatggggaatgatctgctctttgattgtggtatcggtatcttgtatcggaattggcgcttatggcagtgcataggtctggcgtttaaatgtcttgtctcctggttcttcgttgcaacgttgcaacccgtgtacgcagctggtgtgtacatttacaaaaaatattgttcaataccaagaaatgatttagtctacgcacactgtcggaatgataattctgtaaaaagcatagacctattcatcggaaaacgacagatgtggctagtctagccttggtattctcttagggctgatggccgttgaaacgatgaggtccgtcctctgtatgtctttctatgaatcgtgatatcaatgattgtcgtgtatgaatgtcctctttcccatctatttgccaatgcaattgtgcatgtatcccaaaaggtatcggagtatctccaaaaaccgcagtgtctatatagacaaaaaccagaaaaggtcaaccgcccataacagatctgaagacagtagttcagactgccgcggaagtctcgtcatcagaggacgaggcgctggcattcaggcgacgcagcttatccgacaagaacctctgctgctcttcctggctcttctttaaatcaacaccccagaacagaatcaaaaagctggcaacgctcaacccaaacaagaagtagaatggcaacgagacattacccgacgggctcgcgtcgataattgcacttgagacgatgggtccaataaaagatgaggttttaccgatgatgctgaagagactgaagaataggaactcgtgaccgcggggtgtaacctctgaaatcataatttgcgagtagctgtaccagggacagatgaaaaggccgtagaacgcttggtagacctataatcaatcagtcagatattacgcatcatatggcagagcgggattgacatacccagacttcccatgcatgatggaagccgaacctctgggtccagataccgatcatgccccagccatcaagtaggatgattccaacggcgacggcgttgaacatagttttggttccgagcctgaagcgttgctggattgtccagaatgcgtatatgccagcaccctaagagagatttgtcagtttggaacaatttcgctcgcggaattagactcacctgtgcagcaatgccaacaataagcaggtatgtcagttccagagtattatacgaaacgatgctgttctgcaaagttccaataacagtcacagtggtgttgagagagtctccaagtaagaaataacctattgccaccgttagccccgtataatcacagagatagtaggataaaaagtcttaccaactagatagcacagactctgctttaaatgccagatctgcttcatagcatgccacagctgccacatgcctgcaacaaagatcgaccgtttgccagggtcttgacccggacggcgtttctcaagaataaaccacggaatcgagacgagcaaccacacaccagagacgaatgcgatcagcacactcactccccagttgttattagtctcgctatcattgaccttcaacccgaacatgatgcccacgataatggccaagataaagatctctccaacggactgaacatagaaagcgacattggcaagtttgctgcgcatcatggtgtccgcatagtcatattcctcccgagtgatgctcccggccacatatttgtcggcctcttccttcaattcgatggagttgcgcgctaagcccgggaacgcagcggtccagaaagtgagcgtggtttgataggcgatcaagcctaccatgtatagacccacgccgatacgccacttatccggggtatggacacccaaccagccgaagccaatgccccaggcaataatcgacagcgcaatcaagatgttgggtcgccagtaaccgaaatcggcgaaactgccgattatgaggaacaccacgacttggatggcgaacgagattccattggagaggagcacgatgctgttgacattacgtggtctaccgagaaagtcgagtagtccatcggcagggactgcctgggagagcaagttttgaaaagcagtcggtgcgaagtctagaacggggtcagctcctgcctcaatattagattgggaacgcggatagacccactgaatagtgacaagccattatttccaatgtaatagctgcaatcgtggtttagtttccacacagggtcaattcaacaagccacgcacgcataataagcccagatttccgtccgggtcgtgcgatatctctcgtcaaatacatccggtgcaatcgggtcgtcgatcttgttttggggaagaccatccacctccacagtggaatggatattgtctttctgttgatccatgactgagaaagataaaaggtaaaaaggacaaagaaagaaagaagaaaaaaaaagcgacggaattggacgggttaaatgaaaggcctacaaagtcgccccgcgtgctaaagccatcttgagatgaaccagttgcattgcaattacagtgccgatcacgataacctggatttagtaggctggactatatcgcgtcgggtctagttagggctatcacttgcagagacttgaaaaaagttccggcctctccggtcttgaagtgcttgactactttatctcgtcctatcagatcgtcggattttgcatcttccgcatttggtgggttaggtgggtttggtgggattcggtggcttcgcgaacggacatcgaatgtctcagcgccgatattagggcaggcaatgactagctacggtgtgggagtgagaatattgttctctgcatccgggcagtcgctagatatcgaaggattgaagctacaacataaaatggcgtggagcccgagtgaatgggcttgagaataaggttgtcggtgtaaattgtatggatacgaggagttaagaggctagctgaaacataactggacagtggcggtgggctcatatcccatcaacagtccaacttcaacctcgcgcgtcatatatgagtagaaccttggaactacgatatctcgtcactaagcgaagaaaacagccctaggctagatggactcagacctaaaatgtcgggagataagacttggaattgttacttttaatataaaccatgttataacctcagaagtataattctagacaggagtaaacaaaagcaaaaaaaaatattacataaaaccagccgatcaccgaccatcaaatgacagactatagtataggtgagtgagtatcattcaaccaatcactccgaatcgcccaaggaaaacgacacgcttagaaagtgaaagcgagagcgagagcagcaaccagggcaccagcagcagagccggcgacacgggtagcagagctgacggggacgctcgaggaggcagcggcagagtcggaggaagaggagctggaaccagatcctgagccggacttgctgccaccagtggcagaagcggcggatccagaggcagtgcgagaggcgaatccagcggaagcgctcttggacttaggcttggtggagggacgggcaccgatggtcacaccaggggcggaggcactgacggaggaggcagcaggagaagagccggaggcagaggcaccagagccggagccagagccagagccagagttggaaccggagccggagccggagctagagccagagccggagctggaaccagagccagagctggagccggagccggagccagtggcagaagcaccggagctggagccagagccagagccagagccagcggtagtggtggaggcaccggcggtagcagtcttgccagcggccgaggtggaggaagcaacagcagagctggaagatgtggaggccttgcagctcaggtcgtacagaggggtggtgtcggtggatgaaccagtgacaccgaagctaggggcggtagtaccggcatcctcgagaatgtaccaccaggtgttggtgttgcccaacagggggcaagcaacctcgtcccagtactgcttggcgttggcgacgctggcgacagcgaggttctcggtagaaccggtagtgggccagccggtctcggtgatccagatctccttaccgccggcaacagccttggtcttctcaacgcccttgttgaagagggacttggcgtcgtcaatggagttggggtcggtgttctcgtagtaggggtatccatcgaaaccgagccaatcaacggcctcaatgacggcagagttagagctgttggtccaggagttccaggtgtcgacgtggccaatgggggcaccgctcaaggaagtgccggagatggcggagcggacctgggtgatgtagtcgacaagctcgtcggggtcgacaccgagaccagcgttggccttgacaccggtgacggagttacggtaaagatcctcactgccgacggagataccgacgaccaggtctgtgaagtcatcgccgtaggtgctgatggcagatgtgagggcagcaatctcgttgctcatgtcaccgccggaagcccagagacccaggagaagggtggtcttctccttgatagcggcgggaatggctgagataggagtgttggttgtgtcaccctggatcatggtgtacagacgggcactggtgaaggcgttgtcggttccaacgaggttcttggcagttgtaaactcggtctcaaagtcggattgggtcttgacgctgccatcaaccttggtggagccgtagttgaaaccctgagagatggcgtcggaggtagcgacagccatcgcgagggcaaagaattgagcggaacgcatcttgaatgattgaaaaacgagtgttgatatgggagtaagtgaaagagaaagagaggaagaatatatgagaagaacctggattaaaggagtgcaaccagggaagttctgtacagttaagatgaaggtagaagtggaagaagaagtgaaagtgggaaatgcaaacggaacagaagtaaccctctaaaagccctcgaaagaccgaaagcaaggttggttctggccatgaaaattcagtctagatttcgccacaacgtagtttagtggatcgaagtgggtccagacacgttggcttgtccactttaattctatttgccgccctgccattggtggaaccaccggtggactgattccaaaaatatgcatgagaggtgggtctcgatgaatcccatgggtcccgaggctgcattcgatgattttgtccgatctccccggatctttccatccggctttggaaagcttttcgcatttgaagatggagaggaataaaaggagatcccatttgtcgcagttgctatgtacagtagtgggtcacagacaccttagaatactaggtagaccctatgcaaaggaatatgatagagacaccttggtggagtaccgtgtcgttgcatgatcgaatccaattcattccctggaaagttccatcaggggtttactccgtactaatctcccctatattgttctacggcaacacattcggtctattattaacccacccctattaactaagctcaacccgtgatactcccccgacctcattgatttccaaccctttgtacggggtcatttagaacgatctgctctcgggcaatccttcgactttactccgtaatgaggtgtgattatagattaattatgggccggtagggggcagggcgttgtctcaacgctgtgttgtcgattctagatgtcgaacaatggcattcaatttggatttttctgtatgccatcccgttattattgttccctaactataactgactatgcagatgaccccttgcaggatattattttgatctaaccacaccggttagaacacgttgtagtgcggactacgtgtagactactctgttcttgcccaagtcgacttgaccgatcatacctgctcttaagatggccaaaaataggtattcacacttgtgttcgaggtcagcagcgtaggtacctgaatgtcttacccagcgactttggccttgccgatctttgcttgagtcaaataacattcattattccagatgtatgttgtaggtgagggctatgaatagttcatagtagattccctattcagctcgctcgacaaatattttccatctacttcgtacttcgtaatccggaatggatgggttacattcttcgataggggcctcaatgtccgcccaaccccaacacgagccttttaggtcatttcagtccagattcacattatagtctcgcattgaatcgagtgattggtagtccaataccaatttgttcatcaatatttgttatatatgattaggcatgtattgttcactgtagcaaaatgcctgctatcggcgataaccaactagaagtggggtaattacccacggggacctagggtaacatcgaaggtgtctcaaatcccctttctctacgcccatctgaaaccatggcaattgacgaaaaggttcaagcggtcttgaacaaaacggtcctgcgttatcgcggcccaggaggtgccatcgccgtcgtcaaagatggcgaggtcatcggccagcgtgtctggggattcgccgatctcgaccagcgaattcccatgacagctcaaacgcaaatccccatctgttcaattacaaaacaatttgtgtgtgcgttgttgatcgacctggagcgcaatccaaccccaacactagctgcaaagggcgatgtccggaagcagctctcagatcacctcgccgagatactaagcccggagctcacttctgacggtgaactgacaattgatcacttatgcgacatgcaatccggcatgcgcgactactgggctatgaccacactatgggggtccaaacccgacgatgagttcctgatagctagagactgcggcccactgcttgcccgaaccaagtcattcatgttccagccgggaacggagtattcctactgcaatgtcaatttccacgtccttgcccgaatcatcgagcgagctacgggcgagtctcttgccaaattgctcgaagagcggatactccgaccggctggtatgagcacggcattcctttgccccaacaccgcacatcacccaccgccctgtgtcgggtatgagggcgacgagcagcacggcttcacggccgctgtcaataggatggaatggtccggtgatgctggactagtggcttcactcgctgatatgatcgagtacgagaagtatctcgatcgctgttacgctgatccgcagagctggtaccacaccgcgatcgctgctccgaagtttaaagatggcactcctgcaaaataccgttatgggctagatcacgctgacatcgctggcgtgaacaccattggacacggtggagcgttgcgagggtatcgactgcatcggcgacacgctccacgcgagcgtttgtccgtcgttgttatgtctaacagtgacttcggtgcattcggccccaatatggagatcctccacgagctcttgggaatacctaagcctgtggcatcaaccgtccagccggccgcggactgggtcggcgcgtttcttgatcaagatactcagctgtcgattgtcatcaccaagggcgcgcgggatggagaggtggctatcagatacgacgggtcggccgagcctatcaagcttagtgcaccgaatcatgggaagtccgattccatggtcgcgacgattgatggagattttttgagtattcatcgtgtggtagataaccggatactcagtgctcggcgtattgtcccgaaagagtcaatccttaaagggacttcattccagggtgtctatcactgtgccgagattgaatctaccttccattgcattggcgaggatggcatgctatatggtgcgttcgatggatatctgggtcaaggaattgcaactcccatgaaatatctgggagatgatgtctgggtgttgacttgcccacgtggtttggatgcgccagctccgggagactggaccgttgtcttttctcgggatgagcatgatgcaatccaagggtttactattggttgttggttggctaggaaagttgactatgtgaagagagcctgaggcttttattctactatgcagagaaacgattattcatgtccttgatcatctgtcccttcgtatatatgaattacacgcagattccaagatgctagcggctgacagcgacgcactaaaaagtgtcaaaatcgcagtcgtatttagtgcctacatataaaaatatatacagtatcaacggtccttgtcagaagacactttctgcatgcttaatgctcagaaacaaagatacctgccatccccatgccctattcaaaacaattagtatatttcaatactcgaggtcgtgataatcgaaggtaacttacagtgcccacacacatcgaagtcacagcaatccgcttatcctgtcgacgcagctcagacagagcagtgacgacctgacgtgcaccagtggcgcccagagggtgaccaaaagcactttgagacatcagcacggcgtccatcaaatctggtcggagctcacttacatagcaccaccacgcgggttcaccttggattcatccaagcctagcttgttaacacagtaaacaccctgtaataacgagtgttagtcttgcttaatgtatagtcacatgataaacttaccattgaggcaaaggcctcgttaatctcaaaaatatcaatgtcatccttgctcaggttgaacttattcagaatcttagggatggcaagggatgggccaatccccataattctaggctccagaccagaaacagtagcaccacagaacttggcaacaatcggctgaccgagctcctgggcgcgcgagcgtttcatgagaaccagcgcagcagcaccgtcggtaatctgactggcgttaccaccggtggtggcactaggggcccactgcgggaaggcagcgcggaccttgccgagggactcaggggtcgtgccatagcggatgccgtcgtcgcgatcaacgacgatatccttcacctcgccggtcttgggatccttaatttgagtcttgacgggtacaatctcgtcatcaagccatccggccttctgggcgcgctcagccttctgaaaactgttggcagcgaacctgtcgtgctgctcgcgcgtgatattgaactggttagctacattctccgaggtctggcccatgggtagggagttctgggatgcgatcgggtgcttggcgatgcgctcggacatttcaggggcgccgccgtcggcgttcttgctcatgctctcggctccaacggccactccgacatcgatggatccggcggtgatttggttggcgatgttttgcacggctagaagacccgaggagcaaaatcggttggcgatggaggccgctgctgttacgggatagcctgctgccagcaccgcggagcgggcgacatatgccgaaccggggcagaggacgttgccaacgcagacatcttcaacgaggttggggtccagattggatttctcgcggacggtcttcttgatgtattaattactgcaattttcgcctctaatcacggaggaagaagtaccgtgaggagtgaaatgaggaggtcatctacggaggtatctttcaatccacctttgcgggccttggtgagcggcgtcctggctaggtaagtgataacctgccgattattgattaattatggcaatgaagttgcagctgcaatcagtgacataccacatcatctgggttctttgccagaagcttctggcgggctgagccaggagctgccagctggttggcgacggagcttaaacgttgttgcggtgaagacattgtagggtatcaagcagaattatgaatgagctcaagaacaaaacaaagagaaacccgtttttaatattcgctgcagatatatatctcttactaaaaaagaaccgcggcttctccagacatcctccactccgaggactctcatcgtacaatttgagccgactggaagtgccgggactttgggggtcacacggtgtatgatactgtaatttagcgatcctcggcttgtaatggaagactgtgattggtgagtttgtggattcgtggacgtttcatggtcccacatgtacgtgtactttggcttcaatgttgatcaagggggtatgatattgagagagacattggagaagtcaaggatactctcatatcttgtcattagtaccttgatgtgacctcatctccgaagaacaatcttgaagccctagaagaagtgttgagctctcaaaaccggggaaatcttaagctttcccggggagacctcgggaggattatgggggatttcccatagaccccactgtgaattacattgtaaaaagaagatcctttggtatgaacggcagatcaagtctggctagcttccgttattagggctatgcttgggaatctttatatctgttgccatgccagttcctgagagcttcgaattcccactaggcagagaatagggagacacccgttggaaaggaatcactcattttatcgacaaattgacttgacaagtgcttgactagaaggaaatcggccttctctctcacaatggacattttctctgaagtcagcgcgcctgctgtagccatggcatccgccttgtcggtggccgctggtgcttatctgaatgcgaagcttgccattgccactgatttgcgaacaatatacagcgacaatgctactacgaagcggctaaaccagcgcatttctgagctcgacggctcaacaaccatctacaagatactcgagcgggcggtggaggttgaaggacgggctgccaccgatgcgctctggtttgagcagaagacgtggtcatacagtcaactgaaagactgtcagtatatgcctctgtcgggagaaaacatctcatctgattgctaatgcgcctgtctgtagtggtcgatagaatggctgctcttttgaagagccgtgatatcaaccccggtgatacagtaggtgttttcaccaccaattcaccggagatggtcgtgactgtgtatgctttgtcaaaattgggtgctgtagcagcaatgatcaacaccaacctgcgaggtttgttaactatgcaattctaatctggaagaatactgttgacattagtgatagacgatacttttatccattgcgtcaacgtctccggctctaagttgatcatctcatcagcagatttgtctcaagatgtctgcgtcgacctaccacacttcacactcaacctggactcattcgaaggtgccgaaacagatccagtcgagctgatctcctcggaaactctgcagcaattctctccgtcaggacttgcagcagccaagcgcagcccaaaagacccctccctcatgatctacacatcgggaacaaccggaaaacccaaagcctgcgcgatccgcaacatgctaaccttgatcacctccaccccgctctcagcggacgccaacaacccctcaaagtaccacccattccgcgtttactctcctctccccctcttccacggcacggccttcttcaccggcctatgcaccgccctcggtaacggaggcacattatgccttgggcgaagattctccgcctcacggttctggaaggaggtacacgactcaggtgcaacccgcatactctacatcggcgagttatgccggtatcttctcgcaacaccgccatcaccgtacgaccaggaccacaagtgcatcgtggcgagcgggaacgggctgcgcggggagatatgggagaagttccgtaagcgcttcaacgtgcctgagatccgcgagttctaccgctcaaccgagggggtcgccaaattcgacaaccacggtgttggagcttggggggcgggcaaagtcgggttttctgggcccatccgccgcttcttggaagatgatactttcgtcgtcaagtatgataccgatacggagatgccgtaccgtgatcctgtcactggattttgtgtgagggctgctctcggacaggagggtgaggtaattgggcgcgtccgggaccgtgggatgatgattgagtacctgggtaatgagggtgcgacggaagagaagcttctgcgtgatgtgtttcggaagggggatctgttccagcggactggtgacctggttgttcaggagaaatctgggtgggtgaagtttcaggaccgggttggtgacactttccgctggaagggtgagaacgttagcgcaggagagattcgggaccatatttgccggattgaaggtgtccatgatgctgtggtatatggtgtaaagttgagtgggtatgtattcgggccgtcttgttctttcgttttggtgagatcgcattactgatagtctccaccaggtatgatggtcaagctggagccgctggtatcacgctggtatccccagcagatgagacagaattgatgtcgaccttgtacaaggcactcaggaagaagggtgttccttcgtacgctttgcctcgactggtccgacttactgagaagtaagcattcccttgattgcaataatttggccgtggctaatcaaattataatatacagggttgccacaggtgtcactttcaagcaggctaaaggtgatctggcgaagaagggctggaatcctcgccagcattgtggcggtgatattttgtactggttggatggcacaaagtatcaaaagttggaagaacaaagttgggcagagattgagaatggcaaagccaaaatctgaaccttgactcttgataaatccgatgcttgtcgtcttgttaagcaaccatacggatacccatcatagactcggatgaacagaagccatattgtatctgtcgcaagcaaatactaataaggttttagtaggtggatctattcaagtgggtccaatacatccgtccatgggaaatggatggtagcgatagtggagtccggggatatatatccatgatgctgtgtagtagttccatcatagactttctgcgcggacattacaaatgccggcgaaggaatttcagagaaggacattactgaaacgttgcttctgcattggctaaagaactgcatcgtgacggaggcctggtgcaattttgttctctgcgttgagatgacggaagtagccaagcaaattagtagtgcgctggagctaagcagtccatcgaaatctataaatttattacctgcaaagattaatcactgaagcatcttccaatgatggatcctctattcattgtatcttctatagcggccggatactcataaagttcgaaggaatactaattcagattccgtagcaagacgagaatggctttagactcctcctacgacgagtcatcgccgaataaaggctgtacatacacaagtacctattgttcaaggtgtttctcgactcatggtagcttattaggtaccccgtaatatttctgacgtcatctttagagaacgcgggcgaagagctttgattcgcctagaagcgatttctgcgcccatctcgctctttttcctgaactcatttctgaagcaagttaagcgcagcatgaaacttcttcgtattagtcgaccactgactttgattcgtgatttcactctaatattccggggtacaatctctgaaaggagtattgagaataacaatcaccttggccttagtgcggctatcctagtggccttttaaatgagctcatcgatggtcgatccgacataataagatgttttcttgtggtggttgtggcccacccatgtcaagggatactcatgacttaagtcggatgttcgagtgacgggaagttcaacaactaagtaggacagcatccgtagcttggaatggatgtcagtctagaaatgagatgattaataaaaatccctggcatgtttaggtgctgtgcctggcatctggatgccgatcattgataaagaactggagttcgaagtacggagtatctatagtgggtcggatcaactccccacctatgttgtagcatgagacgaatgttcatgtgtagtagaataagatgaaattacggactgatatagagatacaatctctctagcagggattcttgtatccctcagccacaccctgcaggtacatgaggcgtagaaccatggggctacagaaacggtatagatctgccgctgggatcacgtgtggaggcgtcatcaagtgactctctttctcctcaccccaacttctatctcctaatcccaactccgcaccttgtctgagctggaacccactcttttcctgacattcgactgcacatacctgagtgacttacctttgtggccattttcccgaccgaactacaacggtcacagccatgaagttcttatcagccgccagcctcctggttcttaccgctcctcttgcaaatgcagccgcgttctctatctttgatcctacgcaagcttcactcaaggtgaccgataatgggaagtatccagtcaatggtgaaaatcccttgcagtactgtgccaaaccagacaattacaagctcgagatcgagtcggtggatctggcacccaacccgcctctaccgtatgtcatccacgaagagtgctctctaaatgtagtagatttaactagctaacactttggcgataatagagggcagaagttgacaatctcggccaaaggtaccttgctcgagagaatcgagaagggcgctaccgtgaacctggaagtgaagtggggtctcatcaccttgatcaagcagaccgtcgacctatgcgacgagctcaaaaatgtggacatggagtgccccctagagaagggcgagatgatcttgacgaaggaggtggaattgcctaagcagatcccaccggtacgttgtctttaaccgtttgatggttaagcaagcagctaatgtgttcattacagggcaaatactccgttcttgccgatgtttacaacaaggaccaggagcaggtcacctgcctcaaggcagatgacatcgtgttccacctttaatcctgtctatcttagacattgctttgcatccacttaccaggtggcatctctcgatttgctgaactgtcaatgtcattagcttatgtgcttgactggggttcaatcatccgcgatgctcttttccatgcccgtctcatgactacttcaatattcgcatctgttgtttcaagttctataacgctttgcagtacattcggatatcatttggattttctcatttctacgctctttgcatctattatatctttacagtcgtctgtatacacttcagcgagtacgactgtaaacgtgacagctactacctctgtctgtggctacaatttacaatcacatctctactgattacgcaacgtatgttaaatcaattctgtatacggagtaggcgcaaagagaatatatgtaaagggtatgcgaactcgttccagttgcgttgggtatcttccctatctgatatttccatgtttcctttccaattatactcaagcgccgacatcgtcaatgatgggaccgcaggtgttgtaaaccctcgaggcggaacggcgacaccaaatcgcgatttccctgctaaacgacaaagacaaagacccacataaagcaagcctactctccaaacagacgacggacacgcttgagaacactgtccttttccgggtcgtaggggtggtctttgctggggatttcaaggacggctgggaaaggatcggcgaatgcgtcgacgctatggcggatgcgttctgcgatctgaggttgagatacccgttagcgaatatgtaggcaatgagatgagagcgctgagaatagtgcaatctatggaaaagaaactcacatgctggttaatcaagagcacagcaatgtctttcctctcctgggtgaagttctggaaggcctgttcgatctccgaggtctcggtcttggaatcaacgacaaggaagtttctctgggagccaggtggttcggtaacatgctgtaaaaagagccagcacattaggatggcttctcatataaatgtcacagagacgtgacgtagatggggtagtgaacattatcataccccgatgcctgcgagcaaaagaccagtaaccgagctgcatgataggttgagctagttagctgggcgcgagcttttcgaagacgagcaatctggaagaagggtctttactcttcatcaccgatgacagcaaggaattgccgctcctggggaaccgagttagcgatcggaggggtcattccattgaatcgatgccaggtaccttgtatgttgcggccgataccgccatgacgaggaaaaagaaaagaagaaactgagatttccgagatacacaatcttcgaactggcagttcgagatggatcaagtaaatgacagatctggtgcagctgtccgttgatcgccgtggttatcgccgggagcttctcattacataagctgatgcaatttctcagatttcaatgttgtttactccagggcttcatcgtccgcaacacgtgcaatagctcttgactcaacagcgcctcacctttgatgtcattgaattatcttcttaactaagacgaagctgctgaggaacagcttccgtctactacgacccccgtcctctgacatgcctcgacttgtacgccgccgcccgctctccgagcgcatactagcacgcctgaacccgtatgactttctgctttggctttccgaggaatttgaaggtggtgattgggaccagctagagaaaaactgggcttttcccattggtattgcgctcaacgtgatattcctcatcgcgcgagcaaatagccgatccggtggtggtagcagggcttttgacgatgtgttcggcgaggacgatggcacatccctatttgggtggcttgtaagtcattcttcccggctttgtaccttttatgttgcctatcttttcacgagattcatgacaagctaatcggccgtggttgttctaggcctcattcatcgtccatctgatggcccttgcctctacgggcaatgctatctacacattccagaagaagagacgctatcgattgtttgagaactctattgataacaacccggcgacaccatcagcacatcgtgtacgggttgattcaagccccgtgatgccgtctccgctgcgctacattgccaaggcgctttcaacagaaccggcacactcgagggcccaccctgatgcacagcgagatgtctgggagcttgcaatatgggacccttcgccactttgtctccggctcttttgcctcttcagcccagggcacgtcttggtatattggctgttccttccgacgcagctctcagatccacgccccagcgtgacgattgtgacgacgatcgttctgaccgctcttctgtccgtgcagatgtccttcatctcttcttcttatacacaacaagctaaggaccagaagattgtacaccaagaggtcttcaaagaatatgacactaaatatgtgcaacctcggacacatccgttgatgagagatgttgggacgcagttctcggatgaaccaccaaagaccgaggaggagtgcaatagggttgagacttatagcccggctcacatcattaaccgtggtttcaagaccagtcccaaccctaattacctcaagcacgtcgacccagaaggtttcaccccagtccgtcagccaactgcatctactcccacctctatattccaaggcccacccacctacaccccgagcatgtctcgagatggctcgcctatggctcgaggcactagccgcacaacaatgcgacaaccgcagttccgatctactgcaacaacatcaacaggtgatggaggaagtctcggtgtttacagccatgctaactctccactgaggaagtccgcgacaacttcatttgatcgccgcttacaaaacaacggagactttgtttacaaggagcgtggtacaactcccttgatgcggagttccagtccgctgaagagaagcagtgtaccgggaggaatgaatccaggtggcccagccaccgtcaatagatcggataagctcaacactcggtactaatacgaacgaatgaccaattccatctccactagcatgaaatgtcgtcgatccagatacgtcagatgcggagtcttctccaagccatgtgcaccaatgacacaatagcagcacccttcgtacatatatcccatcgttaattgaggctatacccaatatagtccatttgacgttttgtttcatggcattcattcaggcccaccacgctggagaatgcaagctacttatctagagattagggtccaaggcatttgctttctttgtgatcgctcgattttgatctctgacttaattgacttcgttcattgtattaaatccattgggcggctatcttgcctcggagtccttaagtttgcagtccactacgtccactaagtctggatcgtgctttcttttcaacgttcagtcttcgcaacttccatgcacagatgatgcaatctatttttaacatgtgggaggaaactgtcattccagatgccggcgggacatttcaaccggcattcaccccaggggctggcattcctaatcaccgacctggcattccgataaaccagggtccggagcacattattcttacgcgttttgagcacgatcacctatgaagatctctcaatagccagtctttttggatcgccccgctcctctgagtctcatatcctctgactgtcgccgaccgacatacatctttgctcagaaaaaccagcacagggaaagaccactctctcttcactcctacacggcatgggctaggacaactagactgtgctgtgcccgtagcatttgccgccccgaccacaatcgctgccagcttcagcccacaatggacgatgctcatgtcaaattgcccgatggacacctggtgaatctctcaccacgatctatacgcccaggtgcgtacaaagcgtatcgagtcgaatacaacccctcgaaagagctctcggcaacacctccacctcgatatccgcaagaaagaagatcaccagaatatgccatctcaggaggcacaccggcaaatatatctcaactgccaaaagctaccaagctgcctgttccgaggagtttcactgagaggcttaacgataactcgagtcaaacgcctagtccgactgcacttcctaaactgaccccatccagccgctccctgggacggctcggtgatcagtctaaaacattggacaaaggtcatgatcaatactggagaaaaatccgggataaattggaggattcgccgttgttagcaagacgtgccaggagcaagggcagtgacaatagctcatctcctaactcgcacatctcccatcaccgcagcagactcccggcaagcactagccaagatcaaacaagcttccgggcaggtagtgcgccatcaggcattccggggccaaacactgtcaataccggtcccgcacaggggtcgaggaacgatgcccccactacccttcccgtggacggccaaaataaatggcggaaggaagacgatcaatgggtcatcttggatgccaccgaaacatcaccccagaaatctgtgagaacagacgcgacgagtggttccagccttcgatctcatccttccgtttcgccagtatccgccgaggacagttctatcaccgactgggaagaccgattcgttgtgaatatgccaactgcaaaagatcccaatcccccaacgatgacggcgcaacaaattgccgagtatcaaagaagcattgaaagagtacaccgggacggtggccaaatggcagacccgaacacagtgcctagtcgtaacgtgtctcctgagatcagacacaatcctagcgaacaaagaatccagagcccaagggaaataactacatatgatggggcatacgagaggcgtcaagtgccgatcttgtcgcaagaggaacattactcctcgccgcagcctcagcaaaatcctcagccggagcaactttcacagcctcaaccccagcaaccccagcccttgactgcatcgcaacgccaagtagccaaccactactacagccctgatgagatcggatataatcgaattagcacaatttgggaggaatcgcccccaaagctcaaggataagcgacacccccaaaacgccgatgggtcttttttagggtgcagggaaatatccggggagaagaatccagacgaaatcctcaggttcgcttctctagacgacgcgagtctgcatccactcccattggccctgggctccaagaagaagcaaaaggcgtcgaaggaagtgaagatagcaacagaccgagaaaccaccaacagagtcgaggagaccgtgatccttcaagaagagcgactgcagtcttctcagaattcgagacctgcccaatgctcgaagccgtcagccatgtaccaggatcggagtttctcccagaacccgtccccaatcccgcggacgaggtcacaggactcgagcaaggagaattaccatcctaccagcaatatatccgagcgatccggaagtctagaagaaaatcggggagacgacgatgtgttcattatcacacccactatcacacgcactatgattcccacgcccgacaagaaagcatcttcgccaaagccgcaagggttgcgtcgtcctggtggcacaaacacagtcaccgccgaggctatcaaagccgttcgggcaaaggcccagatggtctctacaccgtcggggttgcggcccgggggacccaaaatggatatcaagccaacagggcgtaccttgacaacttcccaaacgttgccactcagcagcacatccgccacactgaaagaccaagacgacgagagtcgaaaccaagatcatgcgcaagatcgcaatccggaacgagtagcaggtacaacgtcgaatactatccgtggcttcatccgtaccaccgggcgggcaaaaccttccgggctggccagatcatctacagatagccttgctacaatcctgcgcaacaggactgagtccctccgtacacgcgccgagtctctgcggaatggttcggggtcaccccagcgtgcgaaccaaaagcaatcgccaagtcctcaaccgattcttccgtccagggacaattcggaatcatcacgatcggaacggtcatttcagtccaaagaaaccccaaccgccacgccaaacaggcccgcttcgccaaatgggcctccttcggcaaacaggcccccttcgccgaacaagcccgcttcgccgtccaaaactgcttttacggaaatcaaacccgacgaaccttcagcacgaccgactgcaccaagcaaaccagttaagaaaaaggtgaccttatcagagggatcccctttgtcaacgaaacccgacaagcctcctacatcaaccaaaaagatctccgcactagcaaagccgtctaagttggataaaatccccaagcctacaaagacagccgtgtctgaaaagcctcctcccccgaagacgaagacccctgatacttcaccaaaaaaggaagtgcaggtcaagtccctgcctcgtctccagacctccggtaaagttttggaaatcgcggagctcgatggccttcaggtttcgagtcccaaggagtctcttcaatccaacattacagacttctctaccgatataggcgacatgcactccgaagacaagggtaactctgagggccaaggacccaaccctttggcgctttcacttattttcaatattcttgtcgttgccgtcacccaagtgaataaagctgtgcgaatgggcactgacaacccttacgtcaaatgtgtggccaacaacactttgaacatgaccagtcactgttggcatgtctccaaatgcatatataccgtggtgtctcgctaccgggccacaggaacctggcccaggcctcgcagtgaccaggctatcagtcggttcatggtggagcttcttcaagccattgtgtatctcttgattcttgggtttgcagccatgctaatagcccgtgttattggctacgttgttctcgtgagcagctggattgcatggtttgttcgaccgtttgcatgggccttccagtgtgttggtcgtgccctgataatgtaaaattagacagatatttagctctatgcttgtacaagattgtttctctgggagtctcgagtttggaagggggacgttcgtcgtttttggtgctttcgggtctttgtcctggtctcaagcggttctacctactcacctaattgtgtctttcgactgtattcctagcatatcattaaataggtctcaaacttggatattatatatggaatcattgctcctgtagtagtaagaatttatattgattttgatcttctcgacttgaaccctagaaacagaagccgaagacccatgttgaagagggaaataaaatgacatgtaacttttctcgtgtcccccaaatccggaattcaatcttgtgtatgatattctctctctttttctctctttcagtcaaaaaaaagaaagccaaaacagacccaactccgtcatcctggtgttgaatggtcctgtatggtagcccgggataatcttgcaaaaccaatgccaaagcagagaaaatagaaggaacttaaaacatataaagttgctttcagcaacatttttcatgtgtggaagtgcgttgagcaattctttttttcggttcatgcgaacgaggtatccatctagccgagcagcaactcggcgttttgtgagataaaagaagcattctagaaaaaagcaagaaccgaaagatgagaaaaagaaagcagaaggaaaaaggcagggctgggctaccgtgggcagttctagccgccactgcgagctctatgaaatgagaccaagcgcagaagaataacgaagacgataagaacgaaataggccgtaaaggcataattatgttgaatttttgttcttcttgcattttttggggccatccattcttctggattgtgctagtccaaacagaaaatatgatatagtccagaagagaagcaccgggcttggagaagaatagacccgagaaaataaaagaaaagccgatcgatgaagcgccattgttaaaagagacggggtatcggtacattatgttgaaatgaaaacgctgaggaagaaatcgttgagaggtcttcagtcgtgacgccataagacattgcaggggaagcccgagatgtgttggagtagttgtttgtatgggctgtgttatcgttgagatgagtgatgttgaattaggttaggatgttgagttgatgttatgagaggtttgcaaagatggcatacgaccgaggtaggggtcgagggtgtgaatggatagcaaccagttatgagttgaggaaagctgctctaattggcagcaacgccattttgctcggcattgccgttgtccaatggtaccccaggcagttcgacgttgagatctttgacctcgaggccattgaataattcgaagacagcgttagatcggtggaagtcgttgtcaacgatattgaccagataccagtcgtccatcacctggtgaatcagcttgcgactagggctcgctgcgtcataacatttggaccagtgctcgcccaagaggtatgcttcatccttccaggctaagaaactgactgtctcgacgattgtaggctggatgatctcccgtccggcaaagataccccatgtgagggcattcgggctgtcacgtgtgttggtcctgagctcgcctttcttgttagtggcgtggtaagtcaagtcatcgttcttctcgatgcgagtaatgagctcatcgatcaagttggagggaaccagaagctcaaggtaggctttctggtagacgaaaccgttcttggggccccatccgtgcacaggatggcacgacttgactccattgacagcgggctgagagttgattgtcaaaaatccgcgctggtttaggttgagcaaatcctcctgaatctcgcgcgcttcggtcgtgattggcgaatcactccacggcagtcggtcgagcttgccggtcaagaacttaacaaagatgtccgaaatatccttgatcgattttggctcgccccaaagcttgatgttctgttcatttgtacccttcaggcccacgccgtaagcgtcgagttcaccgaatgcaggtgaacgagaatcggtccagcgaccgttagggtactcatcccatgtctgggtacgagcaacgtatgatgagttacggttgcgccagaatactggtcgcacatcctctgtccttcggccgaggccaagggagggccgccagggcagcgcacgttgaataggggaatcgtccgacgggcaaagatcgagctctttgagaaccaattgagtcgcctgagccaggttcatggtataactaggcattgttaggacatgtcggaacaccagaattgagaaaattagtggagccaacttacaaatgcaggtgtttgataccagctgtgaccaactgtctgcacatattggcgatcagagtctttccgatctctcgaaccgcagaatcatcgttcttgaccggctcaagggcctccatccactcagaaggcaccttgaccttagtccagttggaccgacgaatgaaagatgcgtatgtctggataggcatgataccggggataatggggacagtgatgcccttggctcggcacttcttcacccattcgatgaagttatccgcatcataaaacatctgtgtgacaacaaaagagctgcccgcatcaaccttctccttcaagtggtcgatcaattggtccacatcggtattgtcatcggcaccctcgggatagccacccacaccaatatcaaagtggttgccatatttgtcccgtatgtatttgaccagatccttcgcatagcaaaatccattgtccgtggcctcccatgtttccttgtctcgcggtgggtctcctcgaagagccagaatattggtgcagccagctttgtaggcagcttggagcgcttgatcaaccttctctaatggcatatctgtgcaagtcaagtgcatgcaggtctccaagccatataccgattgtgccacgctgaccatctcgcaagtcagatccgataagcgaccgccagcaccccaggtgatatcgatgaatgaaggacctaacccatgcatgcggtccatccggtcgtaaaggttctgtacaccctgggcggttttaggagggaagaactcgaaggaaattccaatctttccttccgcctcatttttggcaagcttctctcggatatgcattttgttgtgttaatctaatatttgtaagtataccaacatgcctagatagtttccatcaagggtcttcgtgctctgaacaaacataccgagggcaataactattagatcttttgtggaactggaacacccgtgcagatgagacaggcttacttttgctgtccgagaacccgagcacaatccctgtgtactgtgacacctcaatgtctagtaccgaggaatagagggcaacggataaaacacaagaaaagaaatggagaaaagtgaataaatcaagaaattgtgaggctccaaggagagtgaaggagaggaattgaggaacccggtgagcggaacattttggtggacaacatttggcggggaaggccggccatcggaggcacgtggtttatttctttaaaggggaattaggggtccaattggcaggtgaaatcaagaaaaaagggcatagtataagggatcatatgggtttctttcgttttgaactctttatattagaaaataagtatcaattggacttttatagcagaaatccgtttctcagactttataaggcgcgatatgaagccataccgcctgcccctccatagaccggcaaaattttctagttcgggttggtttcgcaatttgaccttgttgactctttgacaacagcttcagttctctagagaattacctacgacacccccaactccaaaatgtcgactgttcctcccccttctgccgatcaggactataagtccaccctcctacccctcctcatctccaacaatgtcctctcgttcggcacctatgttctgaagtctggccgtgaatcaccctacttcttcacctcttccctcctgcacactgcaccattgttgcgcgcctcctctgccgcatacgctagtgtcctgtctgccgagcccttcgtcaccaccaacgccgacggcaccgctcagcccaacttcgatattatcttcggacccgcatacaagggtatccccatttgcgcatctgtcaccaacgagctcgctgtgcgggactccctgtctggaaagaccacttgggacaatgtgagctactccttcaaccgcaaggaggccaaggcgcatggcgagggtggaaacattgtcggtgccccgctgaagggcaagcgggtcgtcattgtggacgatgtcatcactgccggcactgcactccgcgaggctgtcggtatcatcgagaaggaaggcggtatcgtcgccggtgttgttgtcctgctggatcgggaggaacgtgtcagcgataccgagtccaagagcgccattggcgttgcccagcgtgatcttggtgataagatccccattcggtcagtcattggtctccacgacctgattgagaagttgggtgatagcattggcgccggcgaggtccagcgattgaaggactaccgtgagcgctacggtgcccaatagacatcggcttgtggaatccgccaaatcaaggcatgatgtatgagcaaagacagcaggatggataccaggatattttggagttgctctgaatatattattacttgaacattacattacatatattcaaatcaggagacggacaccttccttatgggctatttgacctgtcctcgatcatatttagactagccagcagatggctttcccattggctcatcttgggccaatatgatataatggcaagcaaacttacttacactgttgcccgccaaggttccaggaaaacaggtgataccggtgcttaaccggaggtattcaaaatatactccaatcgggaaacatggagctgagtatgaaagcttcccggtctttagtttcgctaattatgtagcgaatatattcatgggtgtgttttttactctccgaatactttacctatgttatattccaacacacccctgaactgactggctccactcggacgccggaatcctcgtcagcaagacaatgttctatatgaactcgaaaaaatagattgtctggatttaagtaccttggcaagccaataatgagaattgcgcggcaatcgacacgcagcacggcagatgctaccactgctaagttgtttttaacaccgtgcacataagcagcaatacaattgcctcatccagaatgaactgggcagtctatatatgtagcaagatgtattatcagattctgcgctcgggcatatgtatctactgcgtttataacttgatcagtacatggttgggacataccttgacgtagtaattcctaaggtagcaaattcaatagacaacacgtttgttttgagcttcgatctataacaatgcggagatcaaccgctggatacatatatttcgaaatagtcaggttttttttagcaaccttccaaggttccccccagatccttagtgagacatctaattggtgctatgtatacccctactatatgttctacggcagctccggtgatatcccaatggctgtctgcgtttcacaaagagtaacagcgagaaccgagactattttgttattttcaagttattttcgagtcattagagatcacaaataattattgcttaactatctccaattgatacttcgagtggcggaagcctttcaaacctctctctaatgtagcatcacatgccatcttacacttaacccagatcccatcaacaattgaactgtctatatatattgcttcaactaccgtcctcctatgaagacctaggatagctccgctcaaatcctagaacaactaataattccggtgtccaacatggaagtcggcttgcatttagaaatagcagcatatttagttattcttcccttgtttagaaggcttactatagacttgaacaactattgaaacgacttagctttctctaggatagactatagctagcaataagtattagaagttcgtataaattagtacaaagtgcagagtacagggaggctcggaccctgtacacccatatactccatacctttatgcaggccgaataataactttgggaacttagcccaataagaaatgaagacaacttgtttttgtatgcactcaccactgagctaacctgttatttctctgatagatacaattctagagttgctgcgcgttagacggaattcctgatacaaatgttgtcttcacacatcaggactgtagaggcaatgttcgagaccatgtcgatgattcaatatcaacgatttagtactcgggtatgtacaccaactctcaagcaagcaaatttgtttagtttgtctagcgtcgagatttcaattggaccaaaataagtctcgatgtgtattccgcgctgctcgtgatccccgctactctagacactagacactatccataaggtagtctcaccgaatcgtcgtgatacctgtaaagcatggattactctattagcctcgtcgagccacggccattccacaacggccgtctcatgcagagatctatggttattactcgaaacctgagcgatggtgacgcctcgtaagacatagatattcgccgcctgagtcccatggtctctgtaaatagcacacagcgttaattaggatgtcaatcagcatgaggacagaactccgtgtactttgtatctttttgcctcctatcagctgcgccttcggctctaaccgttcattccgggcttcaaggagaattgtcgacgtagcctatgcctattttttggaaccagagagaacaccaggagactttgttggaagaagtagactgtggagtatcatactccctttgaaccacgccgagtgattttacccctactatctctcaaacattctcaggtttctcttatttctattagccattccgcagctctcgatttcctttctttccccaccttttctacttaggagagctcctatagattggagactattggtcatattctacttgatggaaaatgcttaaagtctctcgttgatattagtccttttttctcgtcatcaatacaccaccctttcgcaacccctgcgactttccgaaaaagcaaactgtcaattatatgccctgttagtatcgttccttttcagaatacccgagtggcaagatccgatttggcattggtacctgtcgggtatacgagcctctttctcatatccctttgaaggaattaatggacctgctaacagggaatgatgaaacatagtagctgttcctcggaaagcctagtcgggtcaacggtcttcctcccactctacttcatatccgacacatgctacgatcctaagtttctctgaagcggcttagtacattgtttgtcgaccatgaattggagatataaaatcccagtccttgctcttctcgcagctccaggaatcagttggccctacgacgagactctcactgattataacatcaacgaaaaccaaacagcgaccaaccccttagactactggggagaatggcccgaccacacctactttccttctccagaaaattggcgctttcctgtatatacgcttttccttgaccgatttgtgaacggtgatccaacaaacgacaatataaatgggacactctttgaacatgatatcaattcaaaccaaatgcgacacggaggtgacgtggctggtttgctggacactttggactatttgcaaggaatgggcatcaaggttagcttcatggatggaaccttggtgcatatctaatatcaactgacagttgaacttctagggactttatcttgcaggtttggtattgatgaaccagccatgggggtctgatggttactcagcgcttgacacgactctactcgaccagcattttgggacaattaaaacatggagaacagctataacggagattcacaagcgcggcatgtacgttatttttgacaatacggtctcaacgtaagtcttccgtctaaccatcttctcttattgtgtgacaagaatctaacagcactagcatgggagatctcattggatttgaagggtatatgaatacaactacaccattttcggtcaaagagcacaaggccgcctggaaatcggaccgtcaatatgttgattttcgatatggcaacacctacaatgagacatgtgaatatcctcgcttctggaatgagaccgggtaccccgtggacgagtacgttaattatgagctaggcgggtgctacgacagtgattttgatcaatatggcgatatcgaggcctttggtgtctatcccgactggaaacgagagctcgctaaatttgcatcggtgcaagaccggctgcgcgaatgggtgtctagtgtcaaaaagagaattattcgtcattcgtgtatgatcatcgcttctttcgacatcgacggctttcgctatgacaaagctacgcaagctactgtcgatgcccttggggatatttctgaggcgtatcgaggctgtgctcgccgtgtgggaaaagacaatttcttccttccgggtgagattacaagtggaaatactcttggctctatctttcatgggcgaggacgtcagcctgatatgaagtcccagacgcttgatcaagcctttatgatgacgaatgcctctgatccggattactttatccgtgaccacaacaagcaggcgactgatgctgccgcttttcattactccgtttatcgctccctcacccggttcttaggtatggatggcaacttggctgctggctacgacgttccagttaattggaccgaggcctggtatcaaatggtcctcaccaatgacatgataaacgcgaacactggcaaatttgatccacgccatatgtatggagctacaaaccaggatgtgttccgatggccgaccgttgaatatggcgttgaaaggcaacttcttgctcttttcatcacgacattgcacatgcccggcattcctatgctcctatggggcgaggaacaagcgttttatattttagatgcttcagctgctaactatatatatggccgtcaagcaatgtctcccgcgacagcttggaaaatccacggatgtttccagttgaattcgactcaatatttccagtggcctatcaagtcgggacgtttgggatgctacgatgagacagtcacgtatgaccaccgtgatccagctcaccccgtgcggaacattatcaaacacatgtaccagatgcgacaggactttggtgctctcaatgacgggtggtggattcagctactctcaaaccaaacacgtaacatatatctcccaggttctgacggagttgcaacagaaactggcatgtggtctgtccttcgcagtccatattaccaattgcaggatttgggagaaatgggcaatcaaacggtctggtttgtatatcaaaatgacaaccgaacggtgaactatgagttcgactgttctaaccaaactgccgcattaattgctccattcggtaccaatagcacggtgaaaaacctgttctatccccacgatgagttgacactgcaagagggtccagtcaaacttgggttgaacggctctgacgattacaacggttgccttgacagtatgaggcttcgaccatacgaatttagagcctacatccgaaaagagagatttgttttccctcgtcctatgataaccaagttcatacctggacatgacactccattgctatctgctgtcgcgccagatgaaagtgagtcagtggatatcagtttgttcttctccacagagatgaattgctctatggtgaccgagtcaatatcgcttgaatcgtccaccgagactggagaacggccttctttggaccttgccagtgttaattgtgggagtgttgaaccggagattacttcttggacaggacaaattccatctacttggtcttggacaggtaccctgactggtgtctacaatggcgtgcataaattgacagtgaacaacgcgacaactcccgatgggagggcaactaacgccgtcgaccatttcttgttccgagtcgggcagtctgataaccccatgatctttaccacggcaaattactccagcagcttgcttcacagccgcgatgatggtactcttttcattgcacaacatgcagcaggggcagataaatatcggtactctacaaattggggtagtactttcactgaatggctaccatacgtgggaggaaaccataccattgaagaactgccttggtctggaacaaagaagcagggatgggatgggaaacacgttcgggttgagtactggagtcgccttacaggtagcagcgactacatccaagagggcgacggaccgggctggagtcctgctatccgacgtcggttccctcatctcttttttaatggacctttcaacaggtacggatatgatgccggcttggataacgtcgtgaggcaagataccgatggcctatggaaattccgctttatgactgaatggcctgcccagggtcagctgaacgtctggggtataaaccccgataatcaaccggaccaaagttacatctacggagattccgatggagactcaatcctcgaccgtctaccgccctcttcgctaagtgtgacaagcataaacatcactcggcatccaccgagcccgcacctcgcttggaggattcaactcgatgactcaaatttgcagttcaagcttgttcctacaggctccaaatacgttcaaatggctctttttatccttctttgcattgttcctgtcattacagcgtcaacctgcgcttatgtgttcatgaaaacattctatcggatcaagttcaaccaagttggcgtgagtgaaaaaaagacgctcatttcaatggatttcatcaataaattcgaggtaggccacgtggaagatggacagtctagaaacccattcagacgacttacaagcaggtcaaacttccttcaaagtacttctgcttttggtaatcgcactgcccaccgacgaaaagttctgattgcaaccatggaatatgagatcgacgactgggctatcaagataaaaattggtggcttgggtgttatggcacagttaatgggcaaacaactcggacatcaggatcttatctgggttattccctgcgtgggtggagtaaagtatcctgtcgataaacaggcagattcgatgtttgtcatgatcttggggaattcgtatgaaatcaagattcagtaccaccaactgaggaacatcacatatgttttgctggatgcgcctgtttttcgccagcaatccgttatagagccttatccagcccgaatggacgacctcgacagcgctatttactattctgcgtggaaccaatgcattgcccaggcgatgaagcggtttccagttgatctgtatcacatcaatgactatcacggctcggtggcaccgttatatcttttgcccgagactattcctatttgcttatcgctccacaacgccgaatttcaaggtttatggcctatgcgaacacagaaagagagaaccgaagtctgttctgttttcaaccttgatttggatattgtcacacgctatgttcagttcggcgagatcttcaatcttcttcatgccggggcaagctatctgcgccttcatcaacaaggctttggtgccgttggtgtgtcgaagaagtatggaaagcggtcatatgctcgatacccgatcttttggggcttgagaaaagttggaaacctaccgaatcccgacccctctgatacaggcgagtgggatagatccttacctaaggagagagatattggcatcgacaatgacttcgagatccgcagagccgagctaaagcgccaagctcaagaatgggctggtcttaagcaaagacctgacgcggatctgttagtcttcgttggaagatggtcgatgcaaaaaggtatcgacctgatagctgatgtcttgcctggtgtattggagaatcgagaaaacgttcagctgatctgcatcggtccccttattgatttatatggcaaatttgccgcgttgaaactggatcgaatgacgaagctttaccctggtcgagtatgctctaaaccccagttcacggtattaccacacttcatcttctctggtgcagattttgcactaattccgtcacgcgatgaacccttcggtcttgtcgctgtcgaattcggtcggaagggtgcccttgggattggcgccagagtagggggacttgggcagatgcctggctggtggtatacggttgagtccacgactacctcccacctattgaaacagttcaaattggccatcgacagtgcattaaactccaagcccgaggtgagggcgatgatgcgcgcaaggtctgccaagcaacgattcccagttgtccaatgggtcgatgatcttgagatcttacagtccacatcgattcgagtccatcaaaaggaacgaaccaaatcccacagccagtccgctgctgctggtgcatacaatgccatctacgggattatgacgccacaaactgcgtcaacaagatcgggcgcatcaacacctccattacaaccctcaagtcgcccgggtattgtagggtcactacagcgaagctctataatctacagtcgtgatgcaagccctggattcaatgggagacctaaatcgggactaagtcgccagatatctcatggtgttcagccggtatccggcaccattgagcctcgtggtcggcccgacgtcgggaaagtcggtgttatcgagggtgacgacagcgctagtggagcctctccagaggccgaagaaaatagcgacgatgaaatgatggatacctgctatggtgatgatgattattccatgccacctgaaggagtaggcctaggtcgtgcacaaactcctcaacccagtttggcgctcaccaaagaggctctctcggcccaacgcacgagtcaaagctccttgttggctcggtgcagcaacacgccctctagttcaacggcaccgagtactgtcgggacagatgatacccttatccccccttctcgtccatgggcagagccaggaaaccgtctcagtaatgcctcagtcttgtctgtcaattcggttgttggagagaagaaagacttcaaacttcaaaaggttgacccgtactttaccgacagcaatggcgagtactacagagtgtttgaaaaaagactcgaggaactgaatggggcgaactcagacacccaactctgcattgagcaataccttgagaaaagcgaaaagaaatggttcaacaaattccgtgatgcacgccttggcctccatcaaggatcgccagctgtctcaatgcatcgtggcaaagcagagacatccccgacggggtcagttgccaacgacgatgcgacatcccatgaaagtggtgagcgcgaaagaaaaggtgctccgcctgatgaattccttcttggtgatgactacgtgccaccaacagggctgaaaaaatggatgcaaatgcgcatcggagaatggccggtatattctctcttcctcgggctaggtcagatcattgctgccaattcctaccagattacccttctcactggtgaggtcggtcagactgctacaaagttgtacggaattgcgacggtttacctgattacttctattctatggtggtttttcttccgatactacaaatccgtgctcgttttgagtgtgccgtggatcttatacggaacagcctttttgatcatcggaatggcacactttgagcctaactcacacaatcgcggatggattcaaaacgttggaagtagtgtctatgcggctgcatcatcgagcggttccatcttcttcgccctcaatttcggcgatgagagcggtgcaccggtcaaccagtgggtattccgtgcttgtcttatccagggcacgcagcaagcctatgtcattgctctttggtactggggttcaactttgactaaagcaacgaacgcgggaattacggatgtgcaggttagcgtcaccaatacctggaggatgacgtgcgtataacattgaaatcttcatctcaaggatcggagagttgctaaccatttttcatagagcaatatgtacaccagtcgctctcattttatgggcgattggccttatcgtatattttggcttgccaaactactatcgccaaattcccggcaaagtgccatcattctacaaatctgtcttccggcgcaagattgtactttggaactgggtggtcgttattctccagaacttctttttgagtgctccatatggccgaaactggaattgtgagtatccattgggcagacagtttatacgggtcttcttccttcctattcctcgaattacgctaatgattatcacagtcctgtggattacccagcacgccagctcgtggcaaatcctacttctctgtgttgcattcttcggctttgtctggatagcagttctcttcctgctggctaggctatctaagtcccatagttggatcctcccggttctcgcatgtggtctgggtgcacctcgttgggcccagatctggtggggcacatctgggtctgggctgttcctcccctgggctggaagttatacctcgggagctcttatatcccgcagtctttggctctggcttggggtcttggatgcattacaaggcctaggatttggtatgattctgctgcaaacactgacacgtatgcacatctgcttcacccttctggtatcacaggtcctgggctctctcgcaactatttgtgcaagggccttcgcaccaaacaacattggcccagggcctatctctccagatatcacggctggtgcgggcgctttgggtaacgcttggttttgggttgctcttttattgcagctctcgatctggtatgtgcgcccttgtaaggatatgagaaccccgtctaacgtctagattgaagtggtggctttctccttttcttccgacgggagcaattatcgaagccctgatcaacagcgcatttgttttgctggaagtgggcggaatggattgatgattcaagctctgcaattgtggtttcggatttccttgcgtacattgatgatatagttgcgtgttgttcgagtggctgatttgctgtcaaacagaaatggcccgaagtatttagtgtctaatataatgatacaatatctgacaagcgacagaccgtggccacacctgaataaaagttgagacccacctagtgggacccactcatcctaaccgtaaaattctataaaataccttaatatatcctatttgtggtatactaactgaattgggaggtccttagtgatggtaaatgatgacgatggtgtgccaaaatggaattcgagaccaagaatgtctcggtgccatatttgcgacgtctgagatatcagttgacgactgggtgttcgccttggagacgatgcttggcaggacgaagcacgaagcaggaggggagatccgatctggcaacggctactagccagttgtacggagtagtatcagactcctttggtcacaatcacaatctcgaggtgaaatagaaagtgggaagagaataggtgataagggccagtccaaacggaatattcctcaactagggcatcctatccttcatttccttttccattttatgaatccgcctccacagtaaccaaagcttaatgagattagatcacaaagctcatacttcaatgcgctggtatatagacgcgaacgccactgaaagaataaaaaaaataaaagattttgacattcaggtcatcgtccattgtgacgatgagggtaaggcagagataaagggattctggcagctgcagcgcagagatatgggcaaaaatacgtgagcagaagataacaagaagtttgaaaatggggaagattgaattatcatagacatcagtatgattcaatagttgccagcagtttacagggtaaccacgacttgcggccgtttcccaattgggattagtctcacaagaaacacatttttagctcgctctacgtattatttacgctacaatgtagaacgaggaataattttttgttatataaagtacccacgatcataattcattctcgttgaaattcgtaggctacccaaattataaaatagcccatgattagcatagggcaaagcaaaacacaaacagtagccgcaacaagtaggggaatatgattctaaaatccaaacatgacacaaaaatgaattgccgcagtgccaagagccaaacccaggcacttgacaaacacaaagaacaacttttaccactcaaggggctcgttcttcacatcaccgcggttggtcttggggacgggagcggcctcaaccatagtcgcgccacggcggccacggcggaggtaggcactgccatccaaccagggggtatcgagggtgcgcttggcctcgaaagtgcggatcttggactccatctggagagtaagaccgatgtcatccaggccgttgacgagacagtgcttgcggaaagcttcgacttcaaaggcagtgatcttgttaccctgagcatccttgatctcctggttgacaaggtcaacctcgacctcacggccggcgcgggcctcatcggcgatcttctgcagagcaacctcatcagagacgatgacaggcagcataccgttcttgaaggtgttgttgaagaagatgtcggcaaacgagggggcgatgatgcacttgataccgaagtcgagcagagcccagggggcgtgctcgcgggagctaccgcatccgaagttggggccggtaacaaccaggatcttggagttacggtaaatgccctggttcaggatgaaatcggggttctccttgtcgtcggtgtaacggagctcatagaacagcgcagtaccgagacctgtgcgcttgatggtcttgaggaattgcttggggatgatggcatcggtgtcgacgttggcgcgctccagaggcgccgcgatacccttcagggtggtgaacgggggaagaccggtgctctggccaccgccgctagcaggcgctaaagtgtttgtgtggggctcgttgtcttcagggaaatccatgacacgctcgagttcgtcctcgctgtcgggcgattcgatctcgggctggacgtcgaccttaggcgaggccttgccgaggacggggctggctacgatgtgctcacggacatcagcgagcttgccgacaatggcagcagtggcggccatggcgggggacatgaggtgagtacggccctgggcaccctggcgaccctcgaagttgcggttggaggtactagcacagcgctccttgggggacaggatatctgggttcatacccaggcacatggagcagcccgcctcacgccattcgaaaccggcatcagtgaagatcttgtcgaggccctcggactcagcctgctccttgacgagaccagacccagggacaatcatagcacgcttgatgttggaggcaaccttacggcccttgaccaccttggccgcggcacgcagatcctcgatacgagcgtttgtgcaagatccaatgaagaccttgtcaaccacaacctccttcataggagtaccagagacaagacccatgtactcgagagcacgcttgcaagagtccttgcggttctcgtcctcgaagtcgtcggggctggggacaacaccagtgatcgggaccacgtcctgaggagaggtaccccatgagatggtgggaatgatatccttgccgtcaaggaagacctcggtatcgtacttggccccagcgtccgacttcaggctggaccagtagctgacggcctttttccactctgcgctaccgtacttgggggccagaggacggcccttgaggtattcgaaggtgatctcgtcgggcgcaatcataccggaacgggcaccaccctcaatggacatgttgcacatggacatacgggcctccatgctcagtccacggatgacagatccgcagaactcaataacagcaccgttaccaccagcagtgccgatgacaccgatgatgtggagaacgacatccttactggtgacgccggcggggagctcgccatcaacctggatgcgcatatttttgctgcggcgggtaatgagtgtctgggtagcgaggacgtgctcgacttcactggttccaataccgaacgcgagggcaccgaaagcaccgtgtgtggaggtgtggctgtcaccgcaaacgacagttgtgccaggcagagtgaaaccttgctcggggccgataatgtggacaataccctggcgcttgtcgcccataccgaagtaagtgaggccaaagtccttcacgttctgttccagggttgtgcattggagacgcgaatcattctccttgatgaagtcaccggcatttttgaaatttttccgtgaagtggtgggaatgttctatccgaagaaaacctccaattagtcgcgagttattagtagatatgggattgaacatacgtgatcaactgtagccagagtgcagtctggtcggcgaaccgagcggctagcgtttgtgagtccctcgaaggcctgaggagatgtaacctcatgaaccaggtgtcggtcaatgtagatcaggcaagtgccatcgtcttgctcgttgacgatgtggtcttgaaagaccttgtcatacaaggtcttgggttgtgagacggcagaaggcatgatggtggagagtagaaatctgctgggagagaggatataagagtacaagatttaatgaagagagagagcagataatagggagctctgatgaagagcaatatagtagtaaatagtaagtaccgagatctgggcaactggaatgggaatgcctgttatatttttctgcgctgaacatccgcgatgtcgctggagagcttcttgaggggcaaggccgatctcggccggtcagcggcgaatggtaccaattttattggccgatgtggtagcacggcggatggccgatatcggttggcgttggacgatccaaaaaggggaacgcggctaatcacgctttgtggcggatacccgtagaccgctccggcccaagtaatgcaggcgcgctgattggctgtactttcccaaggttccgcctccgatcggcccgccggtttttggctcgacgcttatacgcttagcactgtgaatacgcatccggggagcctcaatatactccttcatcggctgaatgtgggttgtatacggagtactccgtacgttgatctggcttctcattcgggagtcatttcacaatatcagatgcattcatattctcggaaacataactgtcaagttttttgaacttgttcatgatctaacgatctacctaaagtcaggtatcaaaaaacgccaatcctgtatatctctaaagcaaaatttcatcaaggaagaaagcacgcaagcccgctgcccataggctaccgagacgaagcgcccaggtcgaccactatcctctttccagacactgagccactccgcaaggtctcgagtgccgcattaataccctccaacccaccctctgcatgaacaatctctggcaatgtaagatgtgtcgattgcagaagatcttccaaccagcagaccatagcttcacccactgtgggggctgaatggaagagcttaataggcacagtgtgatattgtacaccgggattcttctctttgggcagaccagttaatccaaggaggtgggcgtggccatcaggattcagcgccttttcaagctgtgttgctgtctctcttccgactatatcaatggcatatcgcagcttgcccccggtgacaccgcggataatttccactgcgcgatcagggtcatgtcgatcgactatcagatctgcaccggactgcacaagcttggcaccatgtcgtgctgcatcggccacgcaaatcacgcgtaacccggcgagtttggcgagctgaagagtaatcaaaccagtcgttgttgatgctgcagtatgaatgtcagtggtcagttcataggtagtaacatcggattgattcttacctccccagatagcaacccagtctccgcgttgtggcttttctgagtccaataatgatgcaaagcattcttcatgtatgtcggcgggtatatcattcttattgagttttttgatgatattgggcaaattaggaccgggcacttgtgtgatgagtgaaaagtctaatccaaatgagacacccaaagccagcacagcagcgacgaatgcgactccgacagaagctgaagcgtggatagatgttgaagcaggaattcgggcagcattgaagtcggtggcaatggcgtattcttggaatgctgctttcctaatatcccggtaatctgttgatgggaccatcacaacatcgcctacacgaagacgggatgagcctttggggacttgcagcacaaggccagccaaatcccgcccgttgatccatggcaggctagggataccaaagttgaatgcactgatcaatttatctgttagtcatgcactataactgcccagaatcgtacaacttacggtcccttccagtcgatggggttgaggccgatggcaagaacctgcaaatcaacagtcagcatctcgtgttatacaagatccggtggcctgtcgtaccttgacaaggatctctccctcatgcaaaaccgaaggaatggcatgatcatctaccagggcgtactgttcacgggcccccttgagaagcaagactcgttgtcttgccgcctcagaccgcggcgacgggggttcactctccgaccttgacacatcagagtaatctgagacagactccgaaaacagagtagtcggggtcttctgcaactcttcgagttggaggcaagtagaggtagtcgacatggtgcacgggggtaataatggcatggcttggaaggtagatcgcagagaaaacgccaacccaactattaggcttctatctatattgcgcttcgtcccagtctatataatctctcgggcgagaagataaagacaaagcacgcctcaatttagggcgcggggcagtggtccgaatccctcccatgagcacgtacatagggtcggagtacctccactaatcgcttggctctgagatttcttgcaagatctatgggataatttcgtctcacattcgcgcaatgaggacatttccgtacttccgggggccttattcgtagtcgttatccattgctcatggcggggcatctatggcgtgataaactagatggccgagggtcgatccaacgctcttatatctgccgaaagatgggggactttaaggattggaatgaccaaaggatctaatagaaatttgattggctatatatatgcaatagatcaatagagattgaatattctcgactctgttgaagtacaaaatcgaaaaattggatctcgaatctcgaatttctgagtttatccaaactgatgtgatcgcggcttgcgatgacgaaaactcgcaacctctagccctaagatgtcaacaccaaggacctgaatcacgaatatccggggcttctgagatctgttgagatattattttttattttatctatggagtacggaagaaattatttaccgacttaatccaacatacgtagttggtgattatggatatggaatatatatgtgatccctgagattcgttgtagctgtgcaacataagttgtaacagcatatccttttatagtgattggtacagtaaagctccgaataccacttgcgtatactagtcaggagtaattcgcgtctattttacgtacttatgttgtttagaatacaagctgggattcatagggtatctcctccatgttcccatgcatccatactcagaattccttggattattatcaattccctagatattaccttcattggcaagcattggcaagcattggcaagcctcttcttcactagacctaagaactctactctataaactttccaatttgggatattcgcctgcaggatttctgcccatctcctaagagtcccgtgcgagcacgtaattccaccgtagaacgacaacattgactgggtgtccaagctcgagccgttggaagctagacaggggtccagcaagacgaaacaaccagtcctttccgctattgccattcgcggagcagatcgttcggggcagtacagccgacaacgtggtatagacctcgtgggcgcgaaggttataaaccaccacaacgcctgtgaaaaaaaaaattattcactactcaattatatcttttatttcatcatgacgaactcagaaaaggaagctgtcccgagtgagaaggtggacagtgcaggttctatcacctcgcccgttggtgggccacataaaggtgagtttggaacaatgttcctgtccaacgtcgatgaagctgactttgaccctgatagtcaagtggtaccgatcgacattctacaatgccttcatcctcggtctttgcaacttcctcgcccctggaatctggggcgccatgaactctttgggtggaggaggtgaagagaaaccttacctcgtcaacgcagcgaacgccttgaccttcggtcttatggtcgtctcttgcttcttcagcagtgtcctcgtacgattcatcggcatcaaatgggcactcatcgtcggaacaatgggatacgcaccttacgcagcggggctgtacacaaacaaccgatttggcgtcgaatggctggttctcctgggcgcggcactttgcggcatctcggccggtattttctggatggcagaggcagcaattgcactttcgtaccccgagccatacaaccaaggccgcttcctgggattctggctcagcttccgtgttggaggacaaatcctcggcggtgccatcaacctgggcatcaatgccaatcggtcgaactcgggctctgtctcatactctgtgtacctgattttcattgcgctgcaggcactcggcccctttgctggtctgctgttgagcaatccctctcaggtccagcgaaaagacggagtccctgttaacctgcaggtgacaaaaagtatcacacatgagctgaagagcatgtggaagctttggatcaatcgcaagttcctgtacatcattccgttcatctgccaggctgtgtacacagaggctgtgatgttctcatacgagggattgtggttctcggtgcgagccagagccctcgggtcattcctttccggtgtggtcgctgtaaccatcggcaacattctcggagccttccttgacagcaagcgggtatccctgaaaaacagaactcgatacgcgttttacttcgttgtcgcatggcaaggcatgtgctggatctgggctacagtggtgacaaccgagtttaacgaaacacacccgacatatgactggtctactccaggcttcgggagagccttcgccctcttcctgttctgggttgctggcttccagctcaactatatgtacctgtaagttgaatctccattggtgactattcagtccatgttactaactgatcaggtttttcttggtgggcaaccttgccgatgatcaagaagaagtcgtccggattgcgggcttgttgcgtggaactgaatccgcagctcagtgtgtcagcgtacgtacacctcttatctcgcttccgtgcaacatgaatactaacgagctatctctagtacggtctaagcagcgtgaacatcatggccgcggtggggagtatttatctcaactttggcttgtgggctatcgcgataatccctacctggatcattatcaaagacatcggaacagcctttgaggataaaaagatcgctagagagactcctggtttgcgcgaggccgtcgatcaggagtaatttgtttggagcgtatactggcgcaaatattttaaaagttggtacagcacaagaacatttaatttagaatttggtgtatcaccttccgcgttcaaaatatatacattgaaatgatgatgcttttatgatgagcctgttcccggggttctcgcaacccaggtcaattttaaatctatgcgataaaaccgaactccctattatcatggtggaacacgagcaatgcaaggcgatgtctgacgaacagaccgagcatcccacaggcagtttgtactgcaaccatgtgccacgccagttggtcttctcgcattggacccacccacaccagccaaagattcaagatggtgagattactggattcagtgattcgaccattctcgtcttgggtgattcgcaccagtttcaaggtgtgtaataagcgtagtacggtatcgatgaagtgcgaaggaggactcgtccactccgtgactgaagcgtccagcaacccagtggaagcgtggaactttggtaaccgatgacgaggacaaggaatgagatggaatagttggggagtggagtaaaggaaattgaagatctgtggaatgaacagtagtaacagggttttgctgaaatgccctaggataccaaccacggcaaacaccattcctgcgaaatagcagtatgtatcgcccacaaacaccttcgacggataccaattatggcatagaagggctgccgacacaccgatgaatggaagcaggaagtacatcgacaataagtgcgagtcggtggcagggtgcgggtatggtgtcataggtgcaaggtacatcgcatcattgaatagcaattggatcgcaatcaccagtgactgagctacctcgataccattaatgcctgccaacatgttgatcgcgtttggacagaagattgccaccgctgccatatacatgtagtacagccatccaagatcgacaacatcacccaggtaaggttgcagcggcaccggcacgacgacttgagtgacgccaaagtcgacaaagtacacaatgagcatggggattgcggaaaaagcagggatgaggactttgtgtctccagcgaatgtcgaatagatcatcaccgattccgagaatcacaacggattgcaaagacagaagaccagaaaggtaggaggcgagctattcaattgcacattaaattgggtatgcctcagtcaattgaaatcagaactcaccttgccatgtggaaatcgatgaagaaatcggccattctcaatatgttgcgatggaaccacaacgtcacggtttccgcctccggatgtggctgcaacgatatccttgtagaaggcaaaaggaatgaacataatgagcgccatcagatacacaactgcgcagactgcacccatagtttcaggtctagaacaagatattagtacatgctatgaatatgatctcaagttcaagagccatatacatacatctcgggccggctaggctttgccatatccttgcctttaagtcctgctttcaaaaatacagggccgagccacctgatcagactaaaagccacagcaaatactatgccacatagtgcaattgaagcgactaaaggcgccccatcgccttggaacgtggcgttgagtatggctaaaccggcccccacgagtgccagtagacgccaagtctccttacgggagagggtgcttgggttattcatggcggacacacgaccaaaatggcacggacaaggcccctctgctgcaatgaggaattcacaagaaattcacaagaaattaacctatacaacaagagggaaagtccacgtcgaccgcaatctgtcttcattcttcgataagcttatcgtgttctgccagagttatcccaccgccaattttagcggtgagagggcatccccgtgatgcttgcgaccaataaaggtaaggcgacgtcaaccaactgtttcatacctcatacgtgcagatgcatgaaatccaaatcctcattggcccagatatttaattcgtcagtcttctagcccaagtccgttccgatgggggcaatggagcgccccgaggtaacggccggatttgccgacttcgacgctggccatcgggatctggtcaccgtcaccagatttaacttctatggcaaccgtattgttaccgcttcttctgatcaccggatgaaagtttgggatctacaggatggcaaatggcaaccgatagacacctggcgcgcgcacgatgccgagattcgcgatgtatgtccccaaagaagctagggccaaggctaccattgcggctcgtactaaactactattttaggccacatggaatagtcctttcacaggccaacacattggcagtgttggagaggatatgaagttaaaaatctggcaagaagatgtcacccagccattaaacacaggacggcgattcaagtcaatctatcgcatgactgcaccacaaaggcatccatttgtatcactcgactttcgcaacattgacctggagtcatggcttgccgtgatcacacgggacggctatcttatggttatggaacctgtcagccccgatagccttgcagattggcagcctattgaccagttccgtgtgtgcactgccccggaacgcggcgaggaaacaagtttcaaagtccagttccatcacgatcctaccgacattacccacactgtcttaccggagtccgatcggaagagcctgtcgctaattgtggctgccatggacaccgtcaagctctatcgcactgatgcaaatcgacgattctaccatgcagttgaactcaatgggcacagtggtcttgtgagagacatctcctgggccaatggttctgtgcgtggttatgatcttattgcgagcggcggcaaggatggtttcatccgcatctttgaagtgtacacgacaccagctggccaaacactacagatattcaacggccggaaggcagaacttcgcaagcagccccagtcgcagtcacagtcgccccgagcgacatcgcaatccgggatcggctctgctctagcaaaccgtgtgcctgcgtcggtgactgatcgccaagccagcggggagccacaatttcggcactcgttcaaacaggtagcttgcattgacaccaaacacctcgatgtgtggcaggtccaattctcgttttctggtgagtattctttatttattaattcaaatcttttcgctaatatactgccaggtgactcgttgatctcctcaggagacgatggaaaagttcggttctggaaaagatctttgtctggagaatggctcgagttcgccgaaacagacatggcgtctcagtgatgttcttccaagcactgcaagaccttattcgggattcttgaaaatgcccaacacttgtctcttcctacgctctcagccatcaggcccatttattttgttcgcaatcaatgataccctctacctttgatttttgcttactcctgtgatctcacttggtagtattagtggaactaatgtgctggatttaaggtcgatgtttttgctttatctgtatctccatcatacgaggaaagaacgatgttaggagatgccgtggttggtcccttgacaattttcctctcgagccaaaccactctccactctctatcctcgtgcctataactgttttattatctatattcattgttaattcactatggctgtcggtccgaccatcggcactggtttgttcgtcggcgctggccaggccctcgcggttggcggacctgcctcgctactcatgtcgtacataatcctatctcttttgacctttgccatgaccacgagcgtggccgaagtatccagtcacatgccatcgcaacatggcacactcgttaccaatggctacctgtacatgtcaagcagtctggcatttgcttcagcatacctccgctggtataccctcgctttgtttgttccatacgaaattacatcggcgatggtcaatcttggcctatggaaaccgggttccactatcgcaatcagattgactatcatcacgaccatcgttgttggcttcaactttctgccagaaagactcttcaaaagttccgagcgagtattcactatgatgaagatcggcacaatggcgaccctgttcgtgctctctgtggccctgggtcttgggggtgtggatgcacagcccccatggggattcaaatactggaaaactccgggtgccatgaacgagtatctagttcgaggcatatggggacgactcctgggtttcttgcaatgcctccttgatggctctatcgctttcacgtttgcccctgagctgattgtgcaccgagcggaaatgccagcatcactcgtgccagcatcacttggcgaaacaacgatgctaagcgccggtatcgccggtagagtcacgtccgacgttgctcaaacggcattgccgtatatcatgagctccctggccatgggcgttatggctcctttcaatgagacgcgcctaacgaacaacggaacaggttctgggctttccccttacctgatcggactcagtgatgcaaaaattcaaattgtacctacgatcgcgatgattgcaatcctgctctccgcggtggcttctgggcgatcctttttgtatctctcttctcgcacactttgtgcaatgtcagagctcggtcatgcgccctcgatatttgccactcgcaaccgttggaatgttccgtatttggccgttgtagcatccgccctgttctgctgtcttgcatttgcttccgtgaaagtgccgagtaccatcatgaacacctatctccttcgcctcgttacgagcgccggtttcatttcctcgcttgtgtcatgcaacatccatcatcacttcaatcgccggctccgattgaacaacatcaccaaacggtataatttctcttcacagccagtcggtacatacttcgggatgatcatcagtaccctactgctgctgggcggcggattgtgggcaggaccgaagggaaatattattgggtcccgagcagccagactgatcacctcatatgtcaatatcggggtattcggcctgctgttcttggtccatcgattgcaagactttttgcccgctgtcgaagttggaagacaagaggatctgggtggacacaaccatggcgaccatgaaggaccaagagattctcggacacagaagacatatccgcatcgggggaaactcgatgtaatcccagagggttccgggacatttgagttgcgactcagccagaccacgttctcggagccttgagtgtacgacatgatcgccgacggagatcaagcgacatgcgcgatggtatagaagtggaaaccgctgcgacctagcattgttattgttatgtgttattattgttattattattagcgattagttattccgagttcagttcattcttttttattataatagcattgctaaatagaagaacaggcctgatttaactagtgaatgccaaatatagaatacagtaacttttatatacaacaaacatactaaaactgaccggacaattttttatttttgttgtaccttttgtagtggcaaatggcgccaaatcacaaatcatatcggaatcctaacaaagcccccccttttaccacttgggacaactccgaacctctccaacttcctttcccttttctctctgccggcttttcacgtttgatatacaatccacgcctgaaaccttgtcgtacaagaacagatgacccctttggcccccccctctttgataccataaccttccccatctcctccgatccctcccaagcattttccgtgttttcccatgttacattttactttgcttcttcatacttcctatactccctcatactacctggatacttcatcggcccgccggaactctccctcatttgcacttctaatacttccccacaggtaacccaagtcgcctcctattctcccttactttctcacggatttctttcccgagccgagtttatgggatttcctttgtcctccctcaagcagattcccgtctctatgaggtttgaaggacggccggatcacaaccctcccagcacattcaagacctatatcattttttatgggatcttggtcgctgtgagatatctcgctttccaaggctactacatggcccgacatggcttttattatacccaggctgcctcttgattcatttgaggatatatgtatccttcttttttcatatcagtttcctactcacccatctagatgctaaccttcacgattgccccgttgattcccactgggatgcctagggcacccaatgacattcccgtgacttgccccactgcggtgaatgccgctagtccctattctgactagcgtgttccatggcttcctgagaacagtcggttttgcagattaccaaattacgataccggtaaccttggaatttttccaaattgccaggaaacctgcccggggggtgtctttcttttcacaatgaaatccaagagaaagagacagagcaagagagagaggcccctccgatggttgttttcgggtcgagtccttcccctcctcccccacccccctcgaagtcctctggtttctcccaagtccagacatcgccccctttcacccttacgcacatggtctctctaccagcccggaccgcccattctctgccttaggcccccgtagcctcctccttcctctgtctccagttcctcaaactcgctctctttttcctctcctttcccctaccctctttttttcgcgcttttcttcccttcttccttgttttctctcatttaatctttgcgccaacctcttctaatctctttccgatcatcgattctacgacttcctcacccccctttcgcttccttcttgtgaccgcaccgtcttcaactttccaacgcgttcactgtcctagcgagacgagattggaaagcgacacgaccacgagaaaaactgatatgcgactggaatagtgacagcctggctacgcctctgtcgagaaaacatcattttgtcttcgcctgagagggggttatctgtcggcgatgacagatacctcctccctcgccatcacgcacgccaccacggattcctatccggtccacgcccatcgcgggtcccctgctgctgtcgacggcgccgcctctgactccggcgcacccgatgaagaaccttacaccatcaaatgcatttgctcgttcgatgaagatgatggcaacacggtgttctgcgaagggtgtgagacatggcagcacattctctgctactacccggataagaaggtaccagatgtgcacaactgtgtcgactgcgagccacggccccttgacaaccgtcgtgcccacgaacgacaacggcagcggcggattcgagagaaaagcgaggacggcgaccggaaagcaagacgatctgggcccagaacacaaaagagaaagtccaatgatgctgatgtgaatgcctttggtcataaacgacatgactcgggttcccgtgagcagccaccgtcgaagagaacaaaggtgtctcgcgggccatcaacttcactgagcggtatttcggttcccccgggtctgtcggccgaagcgcgaaaccgacgatcgtctacctcggttgcggtgagcccaacaggcatccctggccctcctattccccattattcggaagaatttctctctctttacgaccgcgatgatcaatttgttgaatcgaagagtattctcaattacggcgtggattttgtgaatgaaattgtggcgtggctgaaggacccacagatcttggcccgagttaccgatggactcagtgttgaagacttcgccaaacggtccgaagaggccatggatcggtctcgttggccctcattggtaacggaaactgtcacggactcgacaattgagatcggtggtaagcaccccgtccacaagatcttgaaaacaaaggatccagttcagaaggacgatgtcgtcggtgaaatcttcggcaaactaggccacgtcaaagattataaaaagctccacagcaaccgatggaatgaattggggcacgccctgcctttcgtgttcttcaaccgacagctggacttgtacatcgacagtcgtcaggagggaaacgagctccgccacgttcggcggtcgtgcgaggccaatgttaacttgaaaatctacatcaccaatggccgccagtaccatttttgcttcgttgcgaaaagagacatacctgccaatacggaaattactaccatgtggtatttcgacgattctttctttccttccgatgcgacagtgaaggaggagttcaaagacagggtggtagacccgacggacgccgctatttgcattagcaccacattggcgaatttcggtggttgtgcttgtggaaacccccagacttgcgtattgaacaagcttgatcgtcgcgccaagccccctcccaacaaacgctccaaatcgaagctcaagggcaagaccaggaagccaaagtccctcggcctccccgctgatatcggtcgcgccggcagcgaaaccaccaagcatgttgatgagcacgaccctccggccgacgcccgatcaacttctggctccgcgcgtggtagacatactggcagcagtcgcgatctcagtcccacggcgtcacagctaactctgccagagctctccagtcgcgaaagacgtaagatagcggatgccgaaaaacaatttcaacagctagagcaggttaggaacgtcaatgccaaaaggaaaaggcgctctaatcgccctccgacacggtttacccccgcgacacagtcgagctcaactcaaactggcgaggacttcaaaccttaccacgagtttggccctgatcgaaagacccgtcaagttacctatgttgacgctcaaactgaactctacgccgatgatgttgaacgctcgttcttgcgcgcagaacgtctgaggcgaggatacaaactcgacatgatccatcctacacttatgcataagattcggtggtgcgcggggcatcacatcgcagaggacttggcccagcgaaatgcatgggaggccggggacttgagtgtcgtgccatctggggtcatcccctggtggtacggttggttcccgctcccaatcgacgacaggtctcatatcgaattgctcaaggaagattccgaccgaatgggaatacctgctgatcacggtccccttgcgatgccccctcggtggtctttccaccagtccaagtatctccagcctgaatacaactaccatggcattgcgatcagaggaatacattatgaccctccagcgcgaccagtccaaggtgatgttgatactcggggcgctctctcatacaaacgaggatccttcgcatctggctctagcagtgatttgctcaagctctccatttcaccttactggccatccactgcagcgcataccttaaggattccgggggctggcaatcgtggctatctgcgtgtttccatgccaccaccatcgaacattccgtcagtccttagtcctggttccatgtccacggggagtctcgcatcacttagttctcgtgacacggcctccccaatctctcttgtgccatcctctggttctacactcgcaggtacgcctgccaagaagaaactcagtcttggtgattatctgatccgacgtggcacaatgacaaccaccccgacttcggagccagctcctgccccaccttctggtccgcctcccgacgattcacgtctacgtactcaacactttctggctatcacttcggtttttggtgataatcatcaacctcctaagaccgaccccggagaccagaaccagtctccggatatcattatgacggacgcaccggaggcaacacccaccaaaaatccatctatctcttcgtaatacgaccatccacgtggtagtaatggtgggcctgtgataaagggaaaattccgccgtggatttaacgttatcttacgacccaaaatttcttttctcgtgtgatttcatttcgataccttacagcgaggcgggcacggcgttcggacttcaacttttttttggctatctgtgccggcttcttttttcttttttttctctccgacttttcggactctggatggcgtatggcgtggtttgggattggttgggaaataccatttgggtcagcgtctttgggaagtgtgtctgcctgagttgcagcacttgatctttcacgatttgtccagtcttggatatgtatggcctcttttcgagatgctagatagcttgtatgaacaatgtaactttttctgtctaacgtttccgacttcgcatgttttattctagtattcctctctgtgtggcttttcctattcaaattaagtggagcttcttgtttgactacgacggtgatgggtaagatgactcaatcatcatgaggggaacggggaaattcttcacccggcccctcgtttcttctcttattatctgtgatttctgcaactcatatccaatgcttatgccattgatcctaaagcagaatgaacaattccaacgatgaaggcctcgtgctggacgagatgcatcccagaccagcagaagtccccgagatcgagcagcccgctctccctccagcagacggagggaaagccgcatggctgatgctagcttcatgctgcttcatccagctaccagtctggggtctgtcgtgaccgaagcaagactctatctgcatgtaaacactaacgcaacatctagggttctccaccgttttcggcgtcttccaagaataccacttaacacacgacgtcctaaaggggagcaagagtgacctagcgactgttggaactacttcgaccgtacgcaactgatacatatgtcaacgaggccggctgtgctctagtctaatgctttatgttatccctagggactgctctatcttctctcgcctatcacttttacgcttttaacgagatacccgcgtctgcagtattattgtgcacccacgggcttggtcatcaccgtgctgggatctctgttgtcctcgttcgcggtgcgcgtgtggcagttgatcgctacacagggtgtcctgtgtgccatcggcaatgggctcttgttcagtccgtcttccttgtaccttgatcaatggttcttgcgcaggaaaggccttgcgcttgggactatgtgggcggcgaagagtattacaggtgttgttttgcctttcgttgctagtgcttgtctaaataggtttggctcgagtactacgctaaaggcttggactgtcgtcacggtatgagcttcctctttcctcggtttgatgttaagcatagggtgtgtcttgggtttgataccgaaccatggctgacaaaatctatcagttgttaaccaccctcgttgccttgccattcatgaaaccccgtattccaatatcgccatctgcttcagcccgtcgcttggatctgagcttcctcacacaaaccactttctggatgctgcaaacgggcaatatcatccagagttttggatatttcttgccgacgacattcctcccttcttattcgacaaggacggtcgggctatcccagaacaccggtacaatgctggtctcgttgttcaacgcaacgtctatcgttggcgggatagccctgggagcactctgtgaccgcttctccgtcacaaacatcatgctgctgtcctcggttggctcagcgttgtcagttgttctcttctggggtctggcatcgtcggctggctcggactcgtcgcagacagctattgcccttctaactgtcttttccatcacgtatggcttctttgccggtgggttcagctccacctggtctggggttattactcagatcaagcgtgactcggcgccatccctggataccgggcttgtctttggtcttcttgctggtggacggggtattggaaatgttatcagtggaccgttgagtacggtgctgattcaatctgggtctttgggagagagtggtctgaagggcaatactgggtttgaatcccagtatggaacgcttatccttttcactggcatcacggcctttttcggtgcatggagctggatgtggcggtatatcagccctgcactgcggtgtctctgttgatcgttcggaacagtctcggagtaggagcagagaataggagttggtggttcatagtaaattaagggaggacaaatgtaaagcgtcatgagtagattcaaatagcagctatctatggaaatgttttattcaatcaaactattcttttctggagaatgtcaattcttttctggagaatgtcaaggtgactcgagatgataataccgtgtcacgtgcagtccgcggagcttcgactccaaatgcgcgttcctcaatctcagccccgacaactttcttacatatacctgctgcaaccaagggccactgccctattctacaacaatggcaaccgaggccgcactccaagatcctctcctggcactgcgacgtgcgattgcctctggcaacctcccaacgccgacgacctcgtccgagctgtccgaccagcctgccacagacgacctggccaaagccacacacctctacttcgcccaaccagcccctcaaacaatcgctttgtcaacactcacacgattcatctcagcatctaccaaagcccccgttgacctgcgcagtattcttttcgcctggcagaacaaagatgtcgctatccccgagtacatcgccaaggcgcaggaattcaacgaagcgctgaagaagcagacgccagagggtggcaaggaggaaagtgttcagatccttatcttccttgagcgccttgaccttttcacctggctcgagggtgcctccgacgacagcgaacatatcaaacccctcgagggtgctgctgccgctgctgaggcagccgccgcggctgcaggtgtcgcgcaggccgataatgccgcgggaattgccgccggtgcaattggcggcgtcacgtccgtccccagtggaaccgcaggagcagcccaggctggaactcaacccggccgcccacaaaagcagattgaccctcgactacaggagatttacaatggggagcgcaagaccggcgaccgcaacacagtgctacgcggaatcaagccgacagtgagttactctctgacaggatacgatagacggtagcaagctaacgcctcatttcccaggacttctcacacgtccgcaagagcgccgaggtgttcctcgaccgcaaccgtaatcggcccggccagccaggtgtcaaaccaggcagcaagggctccatcccagctccatcagccggcctctcgatgccatcctcgcgcaagtcgagctcctcccactcccgccctgaccccatcatcctaatctcaccctccgcctcctccctcatccgcatgtcgaacgtcaaatccttcctcgaagaaggtatcttcgtacctccggaccacccaaccctcaccggcaccacagacgccaacctcgtaaagctagagcgaccactccgtctcaacggcgacgcttcgaaccccgcgagcgcaagctcccgcgccggcaaacccacccgcccaaccaagtttatcgtcgtcgacggcacgaccaacttcaaaccggagtactggaaccgactcgtcgccgtcttcacgaccggccagacctggcagttcaagtcgtacaagtggtcttcgccaccggagctgttcaagcacgctaccggtgtgtatatcggatggcgcggggaggatatccctagccaggttaagggctggggtcgtggagttgacacctttgctgttgagcgctgggacgagaagaacggtgtccacggtggtgggcgttggcgggatcgggaggttgttgagggtatttggactgctattgaggagggcatgagacttcgtggatggggaactaagtagacttttttttccttttttttggtctcggttcctctttctcggttttcctgtcatcttgtttatctcaataccctcaattctctaagaatatgatgaccatcggcattcaaggcgcagttttaggcgttgtggttgtcttttttttcttcttgttcctatcatgtttatgtatttatagctgatctgggctttcaatctgtaatttcgattcatatctggtataattcgtgacaagcacttcttcctcgggccaatatagccctatctaactcctagaacacaacatctgcctacattcctgcatactccattaactattgaattgcaatatatgataatataagaccgtattcattgcaattcccaattgaaggataatatgacatacacaagcagaccagaactcactcgctgtgcccggatagaacgatgcagggaaacttaagggacaaacgacggataggaaaaattgaaatcgagataaaagaaaaaaaaggacaaaaagatatggaatcatataacatgctcaaatgaaagcaataaatgcaagagataaagatgatgcgatgtatggggggacaagaaggacatgcaataaacaatcaacgccgggtctgatgctcaaaaggaaaaaagaaatataagaagaaacagcctccgatctttcaggttctcaatgttttgtttttttgtggttttctggttctgtgtttgtttcttttggggagagagagagatggatatggatatgggggaagagtgcgaagggaagaaagagtaagggaataaaggaaaaggaaaataaacaaaacaatgccatccaaatattacaaatattttccagttccggcctttctctataacatgagccatcgatcataacgtctttcgttcagctgagaatctcgtgacgagtggattaaaaaaaggaaaatggagatggcagccagccctcatcgagagagactgtggctggactgcatgcggaggagagagtaaataacttcgtgatcgggaacgatcgtgggcgagattgatcaaattgggtctcagggtcgaccggatattgtgtccccgttttgtatatggtgcgggggtttcggtgttggggccacaagcatgagagtgcagggttgcagtgcggttgaattcgatctctgccttggggaaggcgttcgaatgcggattgctggactgcatgtgtcgaaatgattcaggctgctgcaatgcaccgaagggctcatgaggagtcggaatcgcagtggtacgaatcgtcttcgaatgggttgcgggctatgtcaatgcttgtgggcggtgattgtcaggcacgggcagagcggctcatgctgcgttctgggatggcgggtggagcgggaggagcgggtggtgtgggcgagtatgaacgcgagcctccgatgatgtcgacatcgtgttcttgtagaacgacggagtacttgggatcgcgcaggaatttggggacagaatcgcttgacatcagcttaaacacggaagtttgagcaagctcgaacaggtgcaccacttcttggagactcttgaacatggactcgtcgtctcccacggccttggtcatgcggctggcgaggctgttgcggagagcatggtcgatgtttagttcacagggtgagccgggagccaaaaacgcgttgtacaatccgtatgctgcagccaaagtttcccgcactgaatcgaccttgttgaatgtacccatcttctccgccttgtggtaattggtggtgaattccgacacatcgaggtaaaaagatagattctcttcacacagcgagtagcgaaggaactcacggaaaagcaaacgcagagcgggatcctggaggatatgggtcaatcgggcgttattggaatcgcgtggcatcccacgactgtcgtacgttggcgcaacctcgcgggtcttctcgcgggcaatccatccacatacgcgctgcccccgttcggtaatgccgtagatggcatacttggaaggctggaaatgagcattggtcccaacatccgggaattgcttgtcgtcttgaatcatcgtgatcaagccatacttcaggaacagctcggagatcaaacaggtctcccggcgctcgatagtagtcgaacaatccatcaaccagtccaccgatgcctttccggtaaatgtgttgctataaacctttccatccaggagtttgcgctcccgagccaccttcactccaaccaggccgttggtgtaatcactaagcgagtccgaatccgaggttgaaatactgcttttgatgttcgggccatcctgaccagcaaagcggcggaagatcacctcgatcgtcgcgcgatcatgggacagcttgtcggtatccgtgtcccgctcgagattcaccagctgcatggtattgcgtggcgactccagtacatccatcacgtgacgagcggtaatgccgttacgctggcagaaacgctgcaggatattgataccctttggggtaagctggaagagggcgcccttgagcgggaagatcaaaagctccctgccgtcgacggattcaatgaagcgcgcatcgacaaatcgctggcagacggatcgggccatttccttggccatagagaatgtagtggtggtagtagtcgtaactatgcgggatgggtccttgggatcgggcatgcggttggactgggagaatttgagcgagcccaagttgttgatggcctcttccgaggtgaatgtgtggtcatatctagtgaaacgaacgcggtgcgaatccaacttcaagctgaccatcaatgtggagaacaagtccatgaaatcctgcgctgatcagcccaattgttctaattttgcaatcgcattccaatgcgagcctacctttgtgaatgggcgctcatcctcggtcatgcgcaacaaccttgacgacgtctgatgcattttgggtgcgggcggggaaggacgggtttcgtggggaggtgtaggaagacgctgaagagtcaagcgacgcttgagcaccgaattggcaggattgtcgaccaaggccggggacgaagggcgcgaggttcccgtcaattgctcgtaagtgtcgctgtcgaatggtggggtcacaggggttgcggagagcttatgcggtctcgacaggctaccgtatgaagtggaggagcgtactgtacttccagacagactagcaagagcgttggaggtcttttgagctaaggcagcaaaagaacgacgattgcgtgagatgataccgccaaaatcagaatcaggaactgaagggagagaatattctcggctgtggctcccggtttgggttggcattgaatggttttgagtcttcgggttgaaccagagggaggaaaaaagtggattatgccaaacacctgataccggaaaaaaacatgggaatttggtaaaataaaaaataaaaagaaaataaaaaagaattaagtggactaagtcctccaaggcaaaaatgtaaaaagggtaagaagggggacagcaaggaaattatacactatgacaatttcccattagtattattttctctttttttttcgaatcgatttcaatagaaaagaaaaggaggagtagagggaagatggggctaaaggggggggagaaagagaacgggattgaagagaaaataagaaaaatgatttttgcccgaataattgaaaatggaaatgaaaaagaaaaagaattaaaaaaaagaaatcaaaaagacaagaaaaagaaaagaagcgccattcggcctgtcagcctacaacatatgatccacagcccacgcgtgagccccgaaagagtttggcctgatgcatccaaacaacgtgggccatgaagatcggtgggttctggggtctggtattatatttgtaccataccatacctgcatattggctccctgggtctgcaacggatgttagctaataaatagctccctggtaattgcatgcaaggggggttatcaagtacaccagagccaaatgactgggagatgtgaataccctctctatagtccatagtcgatactcatggtttgggcgattccaaatcaacctatggaaccagagacagaaattaattaaaatggatccgcaatctgtttccaatgatttcattgattttttgcccgagttccaaggtcgaccgaacaaatccgtaatacgtgatactggtaatacctgtaccctgaacattgaacatggaaacattcctggcatacctcacccgttccattctgctactaccttactgccttaggactagtcgtctgcttttgagcatctggagcttcggagtattaacgggtgaatccagatctaaatcttcagtgttaccatattagtttgctgtctttcaatagcctcctccggcttcgatgggatagatctgactatgtcatttcacattcgatgtgtaagctaatcccgacaaaacaggtaatgatgtgaaagcttgaatccacgtggaaatccctacacttcccgaaatctaaggttatattgctaattatgatacatatctatgttgaataatcatcaataatagctaccatgggagtcattctaaccttatcaagtagcccttggcaacctagatatgacaacgggacattctttgcttgttcctcatccaagccacaccaaacctggaaatagatcagaaacattgttctatattggacacatggttccgggctgttgccggagagtgggcgttattgtacctatttatgttgtctccagagaatcagaaacatcctcgtacatatattgttgtatcacatgtcgccatcgggtcaaagacccccacctcactccgatcgtccaatggtggggcaattaggaacttggcacgctttcacacttcttccctgtttcgtaccgagcattgcggtgtttcgtcttgtcgctaatcctaatttggaatgtcagggaggtctcaatccgaaactatactaattgtacagcgcaagaagacaacatgatgattagttactaatcaatatataatcctcattgtcatacacaaggttgaatgttcatagtggggggaggggtatattatttcccctttgaggaccttgcgtaactagaaacatcccaaggcggtcaaaatagattaataataatcctaatctccaggcttccatggcaattccaagcgtcttcttttcgtttggtgtgcataacccatgtggtcccacgtgggcacacgtggagagagatgcttagcgtctgaccgccgaatccgctctcaactgttttgcgcatagaaaggaggcgcagcctcgcgaatctttgccgaatgtctcagttacgggtcgcgatgggcagctagcgctaacaagttccaggattttaagcgtgaaattaccctatcattcaacggttttggttcgcgtctccggttcctggaaaaagcgggtttcaggtttcctccccgtccagttttcgcgaaaacacggggttttaccgccttgacgaaacaattgacgccatccaataataccagagacgcccctagtgtcgcatacccgcggatcatgatcgtcaatcatcgcgttatcatttcctcatggcttgcaatacgtgaccaatacgcagtgaggcaggggtcgccaatctccgtggtcggggaccaacgtcagcgagataacgctaagggttaacacgagagcctcatcttacacttccccggtaagacagcccccaacacgcacaaagacggccctaaggatttcacttgcatgaaccgcgcttttaattggaagtttcagaaaagccattcaacgcccccggtcaagctatcagacacgtcagcaagacccgtgctgaccaagaaacggtgccggccaaccaaacctcctggaacatgtcacgcgaaacaacaatgcaagacgttagtgcgagtttcacccgccagatgccgactttcccttgactgaccaacaatttcctactccgtccctacgatacgaattaccagtttagtattccctatggagtagtcctaaaaaaaagaaggtttggactccgctcaggcgcggccatagagacagattgagcaaagatactccgtgatatgatagcatatgatatgagattggctcccccgcaagacgagattagccaacgaaagttaaattggatagcgcagatcgaagaactcattctactttgtacaacacaggacagaaaccttggaaggagataagaacattcgaataagcgacacgtcatatcgacatactttgcactatgtattgagatctatcgcgcaggatcgatcacaagaacgcgatcgaacggtgccacgtgtattgaaggggaataaaactgtttctcttctaacacgggcagctcgccggaaagggagtttccggtcgcgacatctcggctcagccctgtacgagcaatgccgatttggctcatatcactcccgtgtggctctagtgagaatgatgggtttgctagttgactagtcagttggttggtttcaaggagtctgacagaaccaagtgagcaattcaaggagtgggttagccaataattcgatatcatcgtacggggtaactactccggaattcgtatacgtatatactatgtagattactttcaatacgattagtgctcgcacatcagatccattattgcgagacgctaaactcgaagagaattggtggaaactatccctgtcgctttgttccgccaggcatgtcgaagtggattgaagctatccaaaattcagccccgcttacagattggctcgcggaggttttgctgttcagagtctaaagttgcggtcagacattcaacggtaagtagaaagatatcacttgagccgaaggagactccagggaccctcttgacgtgatgaggtatgtatcgttgtatctgacattacctctatgtaatttaagccacatggtattgtctttgtccagggtgtcaacatccctggcggccacgcgacaagggactcctgcaggcttgcattgttcaggggtaaaagacaccatctgcatatatgtaaattataacgtggattgtacaagatacacgttttgacacgagtcatgaaaactcaaaatcaccctgaatcatttcagctgccaagatgtcaatcctattctttcgggacaagtctgcatcctttgtttcagggccagggctgtccctagatgtcgatccgccaaatgaaaagcttatgtacattagctagctctatgacataccttgcctaaagatagaagggaatctcatattggactcccgtactcgacacaggcagcttactttcctagccacatatcacctccttgcctattcgagggtccctgcatgtagcaggtgtgcttcgtacatactccgaactgcatggttgtatgcagatctccacggaattcagggactcgacatccgagagttaattcctgttctgtaggaatgtggcttgcgcgattgggattcgaactatgcgctgatgctccctgggctgaccatgctaaaccctaaacatctgaaccctggctccggggtgattgctgagtaaaggatttagattttgaccaggcccggggtagagaagggcctagatgaatctcgaccttcgccttcactgccccttgatgcacatcccatactgagttcatttagatgttctagatcgcaatatcatatcaaccttcaatataaggtcgatcttcgctcccgaagacccatcagcagtccagatttaaataggccaagaaatcccgaggctacgtatcacattgcagaggccgaagctgccgagagctacgaatgtgggggaagcatgactgatgttacagtgccacgtgaaatgccggagaggtcgacaatttagacctcgagcacagatctatctgatcatcctctagttacagtagggcgaaacttgtaagcaaggtgtcgacctatccttcgcaagtatgaccccgtaatgggaccatgtggcttgcgcagcgacctacccatgtctagtgaaaaccctgacaaagtatgttgtaatgacagaaactctccttgcgactagcgaaaacactagtagaaaacaatcgcgtgcacgcagcacttcgtgaacagagcctcatgtctcatcggatctgttgcctattcggtaccatgctgggggagattgcacatatctatctctctggtacggagtagcggtgctgatctttaattttttgaaccctcaacaaacttaagagctttcaccgtgtaattttgcctcacctcagttcttctcggacatcccgattttttgcaaaatagtctgagtgggtcttttcgcatatgtatatgcaaagaccaaggttctgatctgcggccagatacggagataagagaaggatcttcgatgtagcgaagttgaactctgtttttcacaaatgggagcaattcgagtgcacacatcatactcccgaggtccttataggccgtttgtagtaatatcccttttgcccgtgtgtattataccggtgtatcataccgccacctgtatatagaatacgaggaattcgactttacccgttcgtgatgggctccacctgctgaaaacaggtagtgtagggtggagtgtagcagtgaaccacgtcatagactttgaatagttaaattattgaaccaagactttaaaaaggtggccctgaatcatgtacggcatccacagtcccggatttacgttaacggcgaagtccggcgtggcaaatctgtggaaacgctagaagtcttctagaatccttctagaagacgccaagaagccgcgtttcgggcgatccatggttcagcgggccaatatattaactgtttcgtctgtttatcccctttctgttgataaaggggctgtattttgggaaaagtctattctggttccgatgcgttgtttcaatgttgtttttctcctgttcctgaattccgactgatctcggaatacaactgaagataagggcttggtgtcaattgtaaaatgtcgaactatattcgcgctaggcattacttaaaatgtctgccaaaccaatgagacatctaataatatacgatacagaacaaattcatacccaagagtctcatgttggatctacgttacttgtagatctacaatgtacgtaagaataaggccgaaagcgagaaaacaacaaacctcttacggtatggagtactttgtatacccactggtccaccttcacggtagacacggcagaagagccacacgggaacaaaaggaccttgaagtccacgtggcagatcggcaaaacaccggtgacagagagaataatagccgacctacatatcaactatagccctaacctggttagcctgtgaggtactagggagtagctaaattatggcataaacacgtgtattccgttctttccatcttgattttcttcatgctctcatttactatgttctagtagtatattcaaacaattgggactaaaatcaagttctttcttgaagacgttcatccaatactcatttttcatacattactccgctcataccaatgatattagtttacaaaattatgttgggcatcccaacagccgcacgagccccaagaccaaaacaaaattacccaaaaggcatgtatcgttccaaaaacgcagcttcaccgcaagaccaaagcaaatctaaggcctggtgaaagtttgcgggacctctctcacacccttccaacacctgccctatcttattggattgggcagccaaaagcgcctgctcaggaacagcatgaaattgtgctgctaactgagtagcgaattggtcggtgcgctgcctttttcgcagccataagcagtgggtagatgtgacggcctccaggattccttatataagcgtccgctcgctccgcagcattgagggcttcgtacatgccaccacccgtaggctcccgtagcttgttacacatactccgtacttggtgggcattggttatctttagtttccgaaatatccgtcattatctgtctctgtgtaatgcttgaggaagtgaggaatcttacgagggtcttgctggcacatcaaaagcgcatgcttgggtctgccgctgttcggattgcttgttccacagacactcgaatagaaatcgcttcttctcctctattacagttcactatatatcgctactatatgcttatgtgtttgcttgctcgcttcctgtttgcattgtttactagtttactttcatatattgcttgttagatagccaagcaagaaggttggttgcaacgtttgtagaagcgccaccctataagaatagaatttgtaggtgagatcctgtatcctattcgggcgaaaagaagccgaagacaatatcaaaattctaatgaggatatacctatagagtcactaggccttccgcatatcaaaccccgatggtcctatacgcgagtgacgagattggtttctgcactcggagagtcaaaaaaagtacctggcattgagtcaggttggagtaaatcatagaacgcattcatgaatgatgtgaatcatctattggtcggtagggacggactgtcgctatccttgagtggagtctcaactgtcgaacaagagtcgtgagtggttttttggaattatatatacagaatcgagatgccggtgaagccaaagagggacgggaaattagttcttcattcagtcattatgattttgcctcacgagatgtccatatccaagctaatacgatatttactttactaggtttagtgatctcatatcgatcttgcattgaaatcctagctgagagaaaaagcaaatctgtataatgaaagatcggcctgagatgagaatctatgctaacctatagtagcaggctaagaagatcagggctattggctgtcaggtagctctatgtgaattgatataaaattgaggtgtctaatagacaaaggcttagatgataattgctaatctgttatgcttttcaataagctacattctaaagtctctgtagacctctcctaacatgccatgccataaaagcacctatcaaattcctccttgcgttcaattcaatctccaagtgcctttgttgagaccatttctgcctcaggttgatgagacctactttctaccttgtttgatcttccttctttctcttagccagctgatacaacataacccaaggtttcctttatcaacaagcaagatcatttcaacaagcatcctatttcaaagtaagttctcctctattcgaatcagggtcagtgtctagttaactgatcacctattctttaaagtcactatcatgaccttcgccaaccagaaaaggaaaactacagcctagagcgacaagtgaagagttctacagctcgtcagacatatattattggaacgagcttacgtgcaaacgtccaacctctcatccaacaaccccgagcaaccagttcatacctcgccgcaggtatcgatgaaacagtgcatgttctaggtctgtcgctaagccagtatcgccaaccctaaaaactccatataggacccgaaatcattgcgtcctcttctactgcctccgaggctcagtatcatatgctgcgatcctacatgactcagatggcccaacacattctctgcagtctttgatcaatatgtcgaattaagtggttcaaatcagccagtactgcaaaccagtgctgttttaatatggcgggtgttgcagcctaccagggcgattaaaatgatacttgatagtggattggcttcacccactgctttttcatgcgaggaagcagtccaaggagggagcgctttggaagaccttacagtttcgtcacgaacaactggcttgttcaggtcgtcaggcttttgggatgatttgttcaattttactttacttattttaccgctaattcttatcgtagcttgcaccaataaggggcaaagtactcatgaaccaaaatgacccctaaagtgtaccgaaaaagacatgacaaggtcgtatgaaagaatcattttatcgcgtggatccctagtggattctgagctatattagtatgaaggtttcagggatcgtcatgcagttatcgcaaatgcgataaatgagtgggactgtcgttgccgaatacaccaaactctctaaatgacttgcatcgttatcttgtggagctttcacccatgtgggtgctgaagaatgtagatcagtcggcattgtttgatttgtcattcctcagtcactcgcattcgcattatggtatgaccagagacttgctctgccacgtccagcgtagaattcggtgataacagccttgacttgcgatacggtagttttgcgaaccatcttgaggcagataaccatgtctagggtgtatctcgcaaggaaaaccgagaagttgtatacgttgtaagataccgctttgaggaacaataatccgtacgccatacataatactctaatttgagcttaatgctattatcgtacgtggcaagccgctcaattactattgacggaaatatttccatcaacgacatcagcccatttgaaatacgtcggtgatgcttgaccgtcgttttccgctactgcagggaagacggaagttggccgatgatcctaaggaaaccaaatccaatcaaatcacactccgtgcacgctcttcagttgcaaagtgccgagatcgtcgttgatatctccctaattaaccccaagcctaatagtctaactgtccgacttgagataaacctccgatcatccacttgttttgactttccttatccctgcaagcgcaaaactagccgtcttagcgggtcaagccacgaagcctgaagaaatgcgaaaaggacgattctaactagaaggagacgttctacttttgtctcttctgacaaagcggggcagtcagcgcgaagccggtgaggaggagatgcttgacgttcgctgttctcgtacggcattgcagtggattatgcattttgctatccttgtctagcatctttgcataattacctatacgttgcacaaaagctccttttatcaacatgtcgtgccaggtctaatttaccttctgaaaccgagtctcctatttccgtcgcaaccgcagtccggcccctatctcaactgctgcaacatacatacccggaaagggtattttgggctatcgcatggtccaatgccattcgggatttgctttgcacagccagactgcgccagacacatggtcagccatgcttggtcatgctcagcaatgcccagacggaagcgagcatatcgatctgcaacctgcagcatgacctgattattaacaactagttgagctctgggcttaaagagctagattactccgtatacatcgaagtgcatcagagccatgcgagtattgcaggattgtggagtcttcgacttccctcgctgtatttggctccactactcttcgtttcacctccagttatcacgacgtcacacacatccaataaatagtaacctaagtatcaaaaataaagcctctccgccatatgaattgaatggcccttggcatcctgcagatatcgcatggtatcccagtggtcggcgtcctatatgcagagtaatatatgttcaacgcacaacttaccatactaacacagcagcccctccttttaccatttgtggatagagatatgagagtcagccatgtcactttgaacacatggcaagccacatgcatatgtccgaaggccgcgtgtttgggggttcaattaaatagagtacagaatgtcaacttagaagaacagcatttacggggtacatattcccacaataaatacctttttaccttttaaaagactgtattttgagcaaggagatcaccacaaggcagtaagattcgaaaagctgccagcattcccattggcacagttgcctattagaagtacatactactggaatcaaagaagatgcaagatttgtctctatggagaatcaatcagccagttttgagattatctatgttgtacatggcattcatatctaaatcccgatatcgctaccactcttttatatatgtcataggcctacgcagatcatcagatcatcaaaggctaatcaaatgacatccactgcaccgtctatcatctacaactagcttttgagttatagcaatattacgtacagaccccctcagagctcacgggtacatgtaatccgtatcccaacaacgcgggagtgtgcatttcccatcaaagacaaggatgacgtgactgaccattctcagcaactaggatagacgatggaaaatgatgatcgccagatttaaatggtggtcaggtaggtttggggctagtgaagttttccaataacttgaatcatggagctggggggtgcttgcttggtgtttgttgtacatgtggttatgtacggagtacatggtgttttgatatatccgataccggccgtcggcttgagttcggggcatatgttggggctggtatagatcccctaggcttggttaggatgtgtatatttccttgtatagaattccgtaggctgcttgtgtgtgcgatgtgttttgtttatctttggttgtgttgtgttgcgatatcaattccagaatggagaattgggaaattaattaagatgttttccgactagcaactcatatcatgatagacggatagtcaaggccaaatgccatgcttgtcaccggcacaaataacccaacacagtaaatgcttgcaagatccacttgctgagaggtctatccgcgccaccactggcccaatgcacccccagagccagccatttcaatgacctcctcgaaactaatttccacacggaacatctgcccgtcagcagtgccgttcccactacccacgggtgtcacgagtccccagctgagcagtctttcccaagactctcgggccacatctcggccccagacacggcctggtgtggcagaagctcccgacaccgaggcagatacctttgcggatgtcaggagccgaacgtattctgcgtatgcggcggggaatgaaagcgcaagtggtcccatgctctgtgactgggacccgtcgtttccggggtcgaacagggctgccaagcgtgttgcggctaccaacaaagccagtggcaatgacgagggactggatgatgtgatggatgtggagaatgggagaggtgctgggtctgggcactcaagggattgggaagagaagcttttcggggttgggacttcgggtataggtgcgtcggcggtcgacacactttgtagcaagtcgctgatggggagaagcgcgctgttgaaaaactcctttgctgatttggtttggttgtagatacgcttgaggtggaattgaaattcgttgtcattccacaaatgctattttcaagacagcgatttagcaaagatgcaattaattggataaaggaaaatacagatcttaccttcaaatattccttccatcccccaagcagtgtattccacttgttcgactctactagaatgcgttcagacccaagttcatctgcaatatcaaccatttcggcgtcactgagatccaggctccctaggcagatatctgaaaaggcctcgaaggatcgaggtagaggaacgtaagtataacgatgactaaatcgactcttgacacgcttctcgagcatttcggttacgtcgacctttgtcgtgagcccaatcaccgcgatgggggctttgcgggcttgggcaatatcgaacagattatacaacaaagtctgtcgtgggtgagtgacgaataggtcgaactcatccaacaagatcacaatggatttcgcagcagtcttcgatcctgggtccccagaagtcccgaagagttcctctggatgtgacaataaagccaagagcgtggccatcgtatccgcataagaactgaccttagccgcatcttcctcggtatgcgtctcacggccaagttggcgccacatttctcgcaaagctagacggtcgtctgtgtgcaagaacccattgagacgaacgacgtgaaactcattgcaatgctcctttctaagagacgaaatgatagattccacaatcgccgtcttgccgcatcccctggatccaagaagaagcatggagttgccctctccgatagagacggtctgttcaatgagctgatgaaccttctggtattcagcttcgagtccccgcactggaatctgtcgtttccctgtcagcttttcgagaagaatagtcgagagaatgcgcatttcgtccccaaggcccgtctgacagagcgcctggaattttccagcatattccggcaacggctcggagacatcgatagtctcatgcgcctccggctggtcatgataaaggtcttgctggagttgtattgtatcgatgtcatccaagccgtcctgatacccaggcgaaggtgacttatctttcggctctgcgaccaaggctttcttggatctaggcttcgcggtgcttctcttcgatctggtccttgtaattgtacgaggggcgggttccggggacggctcgtcgaggtccatgtcatcatcgtcatcatcttcctctttaaattcaggttcgtcttcttcttcgtcttctaccggggattgccgcagcttttgcgcgcttcgtgtgggacgcgcacttctcgaaggagtggctgcttgttttctcctcgatgagggtgttacggcttcttggtcgtacctttttggtgttttgcgttgccgcccacttgaccgtgtcccaattcgtgcgggagtttgtgcttcatcttcctcaacctcgccgccttggcccgtcgttacggggtctgggttgtctccgcgggtagtttgacgccgcgatgcacttttcaccggtgtgggagaaattccgtgattgtcgggggatgtcgggacggagaatacgtcttgatcatcatttcccatatcgatgtctccatcaacgtcctcggagacccttctcctcttagatgctcggggcatggttgtggtttgaggaaatggaatagctggtatcgggtactttccaattcgatggagaggggatttcgtgagggtaaaggactcaaaccgggaaaatctggcggtttcctgtcagataagtgtttgcgcctatgtcaattagaatcagattcaatcaatgctgtttatttccgaccagcctgagtagtccaggagctgtcccaccgaatgtaatgacttacaaagagaaaatcaatagcgcatttatcgttaatcaagaccaacaagcgcaacccgtgtgaatcagattccaacagaagaccgggattcaattgctggtcaattgctcaaagggtcggccggacaacaattggccgattttcgcctcaggccgagacgcgtgacgcgaagtcaggtgcttcccgaggtcactttgacaagtcgcaacttggaattgctctttcgttaatattgtcttactgtagggatcagaagtctcaataaccgggattcacagacaaacatgaagaactgaagtcgaactgtaccgactactagggggcgggtatagcaattctcctgaagaacgcgacatcatttgtcaacgctacaaaaacatgactgccaatatcccggagatcatcctgctctgccaggacgcagactttatcaccgcctttcaaacagcgcagcaagagcactggcccgaattaccatcaaagctcacgatcacccttatcaactcgcgcctgaaccgccttgacccctcagtaaccttcgacctaatcgtctcacccgcgaactcatatggccgtctagatggaggctttgacgacgccatctcattagccttcagcccgcgtgatgactacgaagctctaacgcgcgcagtgcagctggagctatacgagaaatggcgaggattcgcgccgccaggcacatgcaggctcgtgcaatttcctgggccgcttttgcagaattcccggcgctgttcctgggtggctatctgtccaactatgcgagagccgatgaatgtcgtcttggaccgggaggttgtctatgagagtgtctggagtttgttatgtgaggtcgaggggcgtaatcgggcctctgaagagaaaattaattgtctcttgatgacgccccaggctgctggtattgggaaggttagtaaggagcgttggtcggcacagatggtgcttgcaatgaaacattttgtggacgcagtcgaaaggccggaacggtggagtcgaatgcagtggaatgagatcatgaaggattgtgacgaagttgcgacgacatggaggacaaaaggagcagcatagataaactcgttcccaattgtccttgtcgtcttaggtctgtatgtaagatcatggctagcctgaatgttacacttatgtttcctacattcatgagatggaatttggccgtgttgatgaggcgctgcgagaaaacgatgacagcccaaagctactaacaaggccacccattagtaaccatggattctatgtgttgcgggaagattaggttctctatagactgggccggggttgagcctgggactctacaagtggatgccaagtatagctttgccgttcgtggaaatcagattcgcgaggaaaaagaagtatctcgattatttgggatatccggatttattatagcacagctggtctttgtggagtactaggaagtgaggttactcatgacggatatgtccaactgctcctgctgtgtcaatgtacgattgagttggaaactgcgtaaaatgcgagcgttggggagattctgtgcctgaaccgaattaatgaattccgtgacactaggatctcctgtagagttgagctttgtccagccaatatgttgaattggagcagaaagcatctaaagctcgtcagcgaagccgcgagaagggatattccatctactgcgtggatgacaggttgaatgtcaggtcaagtctgggagtagttgctatagtatatattgaattcggagagatgaactcttccccaatttaagcatatctgatccgttcgaggtcggcttcaccacagccgaggtccaatatgatgatccgagctacggctgtggggtttagccttaagctacttctactccaacatttcttccccctaaacctttctagtgctctttgcatttgtcattcctttcagataccatgtcacataacgcaataagcgctccgcccaggcaactggacgagttcgaacagctcgtctatgagtatacggcgcgcatgggcctggggaacgaggaagtaagtaccatacgcagcaatattaaaataatgaattgcatcccccgcctatacagcgccagagcgcatagttgaatcccatcgcttacccttattgaagcactgggacatcgatgcccgcggctgtaacctccgcttcgagtccgcaacccgtggtcctccggctacagtttcgttcctcttgacgatcactcctgcgctgaccaattactttggtaacctccatgggggctgcgctgctactttgatcgatgttctatccaccactatcttgttaggcgtttccgagccgggcaggttctccttcggaggtgtcagccgcaacctcaagatcacatatctgcgccctgtgcctgcgggaactgaggtgcggctcgtttgtgaggttattcatgttggcaagcggttggcattgcttcgggctgagattcagagggcggagagtggtgatgtttgtgtgattggtgaacatgagaaggccaataccgacccggaggtgacgcagaggatttgatttgatgtgatgattttgtttctttttttggtacgtctagaagacaacatggatcttcgaatgttaagaggtagccactgggatataaatttatagatctcatttgcaccaataaaggtgccaaattcaagccattgtacgagcgaagatcatagtagtgaccagaatattgtgcttcgtttgctatgatagggaaggacggacaaagaacagagaggccatcgcacatgttcaagagaaatataatcaaccaatctaagcagtactagattatccgattgtaagtcgagtatccctctttactcggtggccagttgctggtcttcgcgcagaccctcaaccttcaactcctcgccagtggcacggcgatacacatcacggacatcatctgggggaattattagccagctattaatatattttcaatcacagatagcttaccggtcgtagtctcgaagtgtgatgtcgcgtcatagctcttagaaatgaagatgttggactcctcgccattgtcggtgggctcgtagagaggaatggggggtcccatgaacttttcttcgatcttgcccagacgctcgaagccaggctcaagctcaaggtggtggttagcatcgttctcggcgatggtggacacaatagcgacgtagtagcccttggggcagacgttatgagcggacgaaaccatggcaatgtaaatatctgaagaggttagtgccctattgataatgactgtatatatataactcaccatgcttgcgtccaacctgggactggggaatgatcagctgcacagagtcactgctgtcggtcttatcgatggggtggttcaggatgcaaatagccttgagcaagtatccggtgaccttagtcttgtcggggaagtaagaaggatcagcgatgatcttcttagtcttagtctcaaacttcatagcttcggattggtcgtcacggtccttcatggttgccttgattccggaaaccttgccgttctcgtaaagcacttcgtcgacgtcggtattcagcatgtaggtaccgccgtagatggcagacagacgagcgaagccctggggcagctcgccgaggccgtagagagggtagatataaggcgactttccgtagcgtgccatagagttgacatacagacggatacggttaatggtttcaacggcagcgccagtctggttgatatattcgtccgaggggtacaaagccatggagtgaccgacgaaatcacgagtgttatcctccaggccaaacttgtcgtaaacatccttcatcgtgcacgcatgaatgtccaatcctgatctccattagctatccgcttcgacgagccccgaactgacctaggttgcaaatacataccctggtgactggctgggtcgtcttccttgaaatcaccaacccactcgaggaacttcttggcgcgtcgcttttcgaacaagcccatgagcgacgagcggagagcttcaccagcatcggaaggcaccttggccacggtcgccttgggaccctttccttgctgaacgtagctgccagcaatctgcttgaactcgaggtatcgggtaacgtccgtggacaccaaaatgttggtcaactctccattggacatgagtagcttggggaccaagtcgatgttccagtcattgaccctcccgtatttcttccatggctcctcgccgggggcaacgttgccgtatttcttgaacagctgcaaagggtgtcaataaggtaagttgggaataaattggtgcacatactgcttcgatgttgacggaagctgcttctctgtgaacattgtgagctattttgatcttggtgccatcatcgtgagcttcgccgacttaccctccatagtgatcattgcgatcgatgtgaaggaccttgttacccttcacactgaggacactgtagtcgaaaaggatgagcaaatggtggaatcatcaaagcccaagctcaaatacctacccagacaaaacacactcggtcaggcctaaacgaaattggtcagttgttgacgttttgaggggatggcggggtagcaacataccagtgccgagcaccacaacatcgtattctggggcgatctcatccataatgaatatggaagttactagaggtagagaaaaatagagagaagattcaagagaatgaggagaagagaaagttgactatctccccgcggatcggtgagaaaggggaactatttgtcggatccgccactagtgaattacctcatgatattaatgacatgggatattttggcttcaatgaacccctgaatatattggattgtttcagctcaggggtaagtctgatttgattcccgatattcttaggtaccgggataagttaaaagggatttgtagtgtcagatgatggaccatctcttatatattctatgtataatttgacatgcgcactactaaaatcaccttggaaagctaatgttacatacttattacccctggagattcggcttaagtctccctcgaccggggctgtgtcttaaccctctggtcatgcttattgttccttgccttgggctgcttcgttgggctcctgctcgatctcagcatcatcgagcccgtagaagttctcagggcggtatccgcgcttgtacatccgcgaggcgtcctcccaagcataccagcgttcacgcagaacgtgcttgatgttcttcatggtgcttcgaatctatgatgaattggatgggtcagtcgagttcaaataatctgaaccaccaattgatggtcggctctgaagtaatgaggaaaagtcttcatgcagctttccaatatatgtagatgaacgagatgacctatacagccggggaaaaactcaccaccttgtcccgttcctgagattcaaatccaccgtagccagcctggattctttctctttcgaaatctgacgtagcaatgcggtttcgttcacggacgcatacatgccacagaccgtgcaagtcctcccaactccgttcgcggagttcttggataccccacggacgacctagattcccaacatcagcactgtccatagagcattatagattcgacatccagaaaactaaccatgagcgttgtcataagccggggtaggtaatgcctgccggttggggggaaagaaggcccagagtccatggttggggtttgtttcccgcggctgcatgtctttcggcgacacaggtttgggcaatggccattttgacacagtgaacggtgttctgggaccggttcgatggatggccgatacaccacggtttttgcttttgtcgcgtcgagggttggcgccgacggaggcagtggaagaaaagctcgaagattggatggctgacagggtcacggaagggtgaagtgacggcgcgagataagtgggaggcaattcggcaataaccagccctctcaggcggctagcaatgcgtggaacctgctgcatgattgtgatggctttccccaggacggtccgagtcggagattgatggcctttcttttcgcgaaggcggcaaggctagtcacgtgacaaaaccaaaccaagaccagcttggatgctattagccttgggttcatcgggttcacgtctttttttttcccgagtcactcttgcttgttttgattccatctttattccagcaaacgacagcttcaaaaatctatcctaaagatatctttaatctttacattttaggccttgagctgcggttaattgcagacttggcctgtgcatccgcgcgtctaatcacccaatcgactactcggcggagcagtgccgcatcaagcgtgagcaagaggcctttgtggattgctctcccctccacagattcaactccggtctattactcggccagtctgcttttctgatttttgacgtctcctggggtatcggaaattaccctcttcttaagcaacatcgactatgaataggccaggttcgtcattttctttcaatgccttcgcgatccctcatgcctttcttatcttgcacctacctccgcggaatacttgatataagtcgtacttgcttctgtgctgcgatatactctccttgatagtgggagttacccagcattgtggaagcgctggggagtccaatggcaagccttggtgcatattgttctacatttgcgaccgagacattcgcaaggacatgcccatgcattcctatggtgttgatctgagcagctcttgatgcgacgatcgtgctgacttgtcacgcgtgtgtcaggacctggcccgcagccgctaagaggcatgtccggattccccacgcaacagcaagcacaagctcgaactgcatcattagcatccacgcgattgtcaaacgggaaactgggtgcgattgcctcgagtcatactttctggacactcaagatgatttgtatgaagggatgctaacatgtgactcgaataggcggcggtgccaattggagcttcaatctacctgttagtggatcatctggcctaccgggcagtcagcaacgcacaatggggaccatgggaagctttgcgcaaagcctaggaggatctcaatccgcagcaccacttgatctctcgtaagtgctcttttatcatggtttgcagtggtctcctgtatctctaggccttccgatttgtctccgaactgactaggtcggtgattctagggagttcccttcgctatcaggagcatcacagcaatcacagtcacaaactcccggtcagctaatgtgggccaacgcaagtcaacgcgctgctcagcaaacacctgttcaaaggcaacagctccccccgacatcgcaaaccccctcccgttcctcccaaccccaaggccttcctacaccccaacaatcccaaccgcagcatgatgacatgtttccctctggctcgcagtttgccaatcgactcgatgactttagaaatggtggccagggtattagtagtcaactcggtgcaggtggccaaccccaaacaggcaatatcgaagagtttccccctttaggccgcaatgctgctgcggagcttcctctcggtcggactggttcgttgatgcaaggtgcaggctttgggggttatggaactggtctaggggcaccccggtcaccagtcagtcaagtgcctaatggcattctaggacaagagaaagcagtatgtgtctacaattgactcactttctaggcagcactaactttacaacaggacttgaacaacggtgtgcttccaagccagcgtaactttagcgatccacaacaactgcagcaaaggcagccagaaaatattgacggacaagatgtttctaatgcggctcagaatactgagcaaccacccctcgcacagatgagtgaacttgacaggtttgggctggcgggtctgctgcgcatgattcacagcgagagccctgatgttgcaagtctggctgttggccaagatttgatgacactaggattggacttaaaccaggcagagtatgagctcctttgttcccataccatttataatactaattctttgcataggcctttgcacacatcgtttgcttcaccatttgtgtcgtcaatgtcagcagtccctctggaacaagacttctctttgccgggttgttataatgtggccaatatccaacccctccagtctcgcattcctgggtttagcgacgagacactatttttcatcttctacagcatgcctcgggatatcatgcaggaactagtggccgaggaattgatgggccgcaaatggcggtaccataagcttgagcggtgctggctgactcgtgatgagacatatcctggacctgttgatgtggaacgtggtgtgacggaacgcggcgtgtatcttctatgggattcctccgcctggaagaaggtccgagtaagtaatattcatcccttgttggaacttgaagaactggttgaactaattttcatcacagcgtgaattcatccttcgatatgaagacttggacaaccggttggatcctaatcgaggcgccgcccgcccacctggcgtggtgcatcatgcctcatgatttgaacttgataccaaggcgcatgcagaatacaagcaatcaaccatggcgttcggtttactggtctgtgttatattgctcagggatggccaatagtacattaaccttcgggaacaaggcgcgttgatttctttggtattaaagggctatgtgggaaaccaggacacgatatttgaaaatcaacagcctatgtgattttgtcacaatgctgtaaaatgctatacatcgctgtagaccactctattcactacctgaatggtttatccgtctagcaagacttgcgcgctgtagacagaatagccatccaatccgtatcgatgttcccatgtccgtaagtgtcttccaagtacttctctaccgccgggcggacgttatccgtgttttcctcccgttgcttctcagtccagaaggatttcatcaacacgggaagcatcatcatgatcatctccaccaagataggggatgtcagggtcagttttgttgttatttcgcggacatcgatgtcctgaagcccacgcccctcgagctgggactcgatccaaggctttgagtgccattgcccatcagtgatgacccccaagagctttggggcctcgggaaaaggcaggttgcctggcatgctttcaatcacttgtcgggcgatggggatccagccggctgtttcatgtcagtgaagttattacccaagagaatcgttccaatacttacgttggatccaagttgagaaagcaatagtcccgccgggttttagcattccgaccgtctctagtggtttctattagccttgaatataataaggaaatgggcaatgatatacttaccattgagagccttgagagactcagggagtgtcatataggctgcaaaagggacatagcagttagccactgtcagaatagaccggagtgcatccatgaacccactcaccaaaagcagtgaagatgtgagagaattgaccgctaggtagctcaggattctgcgcatccacaatctttgtctccgtgttctgccagccctcttcttgcatacggtgcatagtgtactcgatcattgccgacgagatgtctccacaagtcaacttccacatcttcttgacagtgtcatcaagcttgccattgagggtactggagataacaccagtgccacaggcattgtcaaggaccactagaggctgatcagggttggccctggactcggcggccaccttgctctgctcaaccagcgtttccgcaaatggccgggtgaccatctccgcgcgtctaaacgagctggcatattcttcgctcttgaagaaagtattcatgtcgactttttcagccatagttggtaaactgcaaggtaattgcgtatcgtagttattgaagttgataagtgcctgtttagaaggaaccctcaatgtgatgtgatgtgatgcaagaccgagatcatgaaaagatagaggtccttatgggtccaggctgttctttaaatagtctgcggtcgcctaaagctcacatggtttctgtaccagaaattgttgtacgatatagaaagtgtccgagaatgtctccgcgagtggatttcagtcgaggcatttgtaaaaacgcaccttcaaggggtatttagtaactagaaccccttactgcgccttatttcaatgctaccaatggaaattattggttgggggcgactcttacgcagtcacccccagggttccctcttggtagatcgtgatcattatgagtgtattggcaaaagaaggagccatgcggagtcgaagtaaaagcggcaaagtccttcacggataccagttatcaaatccacaattttaatcgtcccaatgtcagttaatgcagagaggtttaatctccagtcgccgagtgccattttttcatacttcgatatcacgtgagaacaaagcccccgcgctgacatcagcaaaacgacgccagacccaaatgggcaaaccatcaacagcgggtgcgggaaaacaatcaatcccctccactccccatctggtcgacctatgcactctgctagcgagcagaacaccgtttcggagtcgcaatcatgaggattactgaaattgtcatagatgtgaggttcaacattgctccatcgttattcactgcgctaactaggtcgtcagggcttcaaatcgtacgctgtgcgtacggtgatctcgggatggtatgcaatctaccgcgtctaagcatgaatgaaattatagttttggcttaatcttgggccgatcggatttgctaatcgcgcaatacagggacgaagccttcaattcgatcaccggccttaacggtagtggtaaatccaacatcctcgatgccatttgcttcgtgcttggtatcaccaacatgactacagtgcgcgcgcaaaacctccaagatctcatctacaagcgcggccaagctggcgtcacgaaagccagtgttacaatcgtcttcgacaaccgggataccgcgaagtcgccgatcggattcgaggagtatgcgaatatctccgtcaccagacagattgtgctaggcggcacaagcaagtatttgatcaacggccaccgggcacagcaacagactgttcagaacctgttccagagtgtccagctgaacatcaacaaccccaacttccttatcatgcaaggtcgcattacgaaagtcctgaacatgaaatcggtcgagatcttgtcgatgatcgaggaggcagccggcacacgaatgtttgaggatcgaagagaaaaggcaaacaggacaatgggaaagaaagaactgaagctgcgcgagatcgaagaactgctgaaggaagagattgaacctaagctcgagaaacttcggtcggagaagcgagccttcctcgactttcaacagacacagaatgacctcgagcgcttgacccgacttgttgttgcccatgactatgttcgtggtggcgagcggttgagagttgcaggccaagagtgcgaaaataaacttaacaaagcgcaagccctcgaggataacgcgatcaaactcaaaagtgaaattgctcatttagaggaggatgtgaaacgggtgcgcacagctcgcgacaaggaacttcgaaagggtggcaagttccaagggcttgaagatgaggtcaagaactactcacacgaattggtccgactgaccacggtctttgatctgaagaatgcaagcatggatgaagagaaagagaaacgacagactattcaaaatactgtcactgatcttgaaaaggtcttgaaggagaagcgcaagatctacgagaagctacaggcccagtacgataccgccaaagccgagttagacgcacaaaacgtcgaagtggagcaaaaggaggaactgcttcaaacattgcagactggcgtcgcttcaaaggagggccaagagagtggttaccaaggtcaactgcaagatgcccgtaatcgcgcaagcaatgccgccacagaacaagagcaaggaaagctcaaaatcaaccatcttgagaagcgaatcaaagaagaggagcctcgcgcaaagaaggcaaaggagcagaacctggggcttttgcgtgatctcgaaggcttgaaatcgcaggctaacaagctagagtccgagctgactcggcttgggtttgagcctgggaaggaggagcaaatataccaggagcaaaccgagcttcagcgggatattcgtgacctccgccagcgggctgatgggctcaagcgacaggcagcgaatatcgatttcaactacgcagaccctcaccccaactttgaccggtccaaggtcaagggcttggtcgctcaacttttcaccctcaataaagatcaagttccggctgcgactgctctggagatctgtgccggtggtcggctttacaatgtggtcgtggacagcgcggagaccggcactcagctgcttcagaaaggcaagctgcgaaagcgcgtgactattattccccttaacaagatttctgccttcaaggcatccgcggaaaagattggagctgctcaagaccttgcccctggaaaggttgacctcgctctgtccttggttggatacgatgaggaagtcctggcggcgatgaactatgtctttggcaacacccttatctgccaggatgctgagacagctaagaaagtaacatttgatccgtccgttcggatgaagagtgtcacgctggaaggcgatgtgtatgatccgtccggaacactttccggtggaagctcccccaattctagcggtgttctcgtgactttgcaaaagcttaatgagatcaccaaggagctacggagcaaagaacgacagcttgcgactttggaagatcacatgaagagggaaaagaagaagcttgattccgttcgctctatcaaacaaaatctggatctcaagaaccacgagattaagcttaccgaggagcaaattaacagcaactcttcgtcttcagtatgtgtttctcctaatctattcccgcaatttacaattaacctgaagtagatcatccaagccgttgaagagatgagagcaaacattgaacaactcaagaaagacatcgccgacgctaagtctcgccaggccgtcgcatccaaggatatcaagcaaattgagaaagacatgagtgaattcagcaacaacaaagatagcaagttagaggaactgcagacgacactcgataaactcaagaagagctttatcaaaaattctggctcggtcaaggagctgcagaaggaattgcagacttccagattagactccgaacaagttggaagcgacttatccgcagctgaggagcaattggttgagtcagacaacaccctcagtgcccaactagaagagattgaaacacaaaaacgagagcaagcacggctgaaggtatgtcatgccctcccaatactgcttaataatcatataactgacaattctaggatgcccatgacatcgcgcaggctcagcttgatgacgagagggccaagctgaccggctttgacgaggaattgcgagaattagaatcagccatgaaaagcaaatcctcccaaatcaccgaggacggactagaggcgcagaagctcggccatcagctcgagaagctgcaaaaggatcagcacactgctagccaagccgtggctcatatggaacaggaacatgagtggattgcggacgagaaagaacatttcggacgcgccaacactccctacgatttccagaaccagaacattgccgagtgcaaggctaccctacgcaacttgacagagcgatctcaaggcatgaaaaagaaaatcaacccgaaggtcatgaacatgattgacagcgtcgaaaagaaggagggtgctctgaagaacatgatgaagacagtcatccgtgacaagcgaaagatcgaggagaccatcatgaacctgaacgaatacaaaaaggaagctctctacaagacgtgggtcaaggtgaatggcgactttggacagatcttcaacgagctcttaccgggtagttttgccaaactcgaccctcccgaaggcaaagacatcacagacggtctcgaggtgaaggtgtccctgggcaaagtctggaaacagagtctgacagaactgagtggtggccaacgttcactcattgctctttcgttgatcatggcgcttttgcaattcaagcccgcgccaatgtacattctagatgaggtcgacgccgcgctagatctgtcacatacgcaaaacatcggtcgactgatcaagacccgtttcaagggatctcaattcatcgttgtctccttgaaggatggcatgttccaaaacgccaaccggattttccggacgcgcttcagcgaaggtaccagtattgttcaggcgttgacccctgcggatttgaaataagcgtgcatatgatcttggttgtctatagtttctttcttggtgtccccggtggagtgggatgattatgtcccggccttggtgtttggttgtctttggatgggaatggactctctcttatgaattatgtgtaaagactatatcaatttgttcataaatataaaatcctgcacaatatgcacaatatcagtgtcagcgtcgaagactggaaacttccaaactcggaaactccgatacccggcacgtgctcgattctcgacctgacccgtgccaccttccaacgcgcatggcgatttcattgaaatcacccccattgcgccaatacctatgtgtctcacctgaacatcacctatattagaccatatccaactcagcgtcttgcctttttcaaacccgttacggccagatatcaacactggggaccttggacacctcactcaacttgcgctctgccaaaacaaaatgacggacgaggagccttcgctgaacataccgtcgcttctcactctagcggttgtatcatattttgttctccgatggttttttaaccgcgatgaaagctccgcggggggaagccgaggtagggggcgtggcaatgtcgtcgatccggcgcaggtggaacagatcgcgcagatgttccctcaactgaacactcgtgatataatgtgggatctgcagcgtaatggcggcagtgtcgccgcaacgacagagagagtcctgactggacgggggctggaaacggtacgtgttgcgctgatgctgtcatcgatttccccaccttatctgcgtctcagacaactcgactcggccacaggcttcaaatatcaactgcaaatagtcagttatcgaagcattgactaattcactttcttagcctcctccttcgttccaacctccggtcgcaattccccccaccaatatcccgctggcgcagaccgccacgcccgtacagaaagcggacgcacaggacttgatatctcggtataatttgagtgcaaaggccgagagccctgctacagagtcagaacccgaaaagccttccaagtcctcttggtcccaaaataaggaagagcgccagcggatactgcaaaagcgtcgggatgatatgatcttggcggcgcgaagaaagatgatgcaaaagagccagggcaatgtatgatatgagaactgtcatgcttgcctgccgacaacgtgactttctgtacactgcttttgacgacgataaacctggccgaacccggcaccagtgtttcccgggggccaatataccctctccatcctttcggttttgtttcgcgacatcagtcctctttgtattaaagcgttcgcatgctccatggtgttagtcaaattggaatagtttcgattataaccgttggtcattgtatacggagggtatactggattatatacatgaaagtcgttttgggcattggtctgcgtcaggtatgcaccgaataactccgaatgaaagataccgccaaaaaagggaaaaaagcaacagcctgggatgattagaactccatgtaatcttcttcatcttcgtcccgggtgtcatcgtaggcaccatttgctctctgctcggccatctgttcacgccgagcctgttccttggaggacccaattctcctatgagccaattagcaacgaagtcccccaaatgttcggctatgcaagtatccgaaaatgggatcacataccgaagaccgtccaccacaccagtaacaaacccccgctcctctcccaactccatagaaccgacacccgtcagagcaacaccaccaccacctgtcgccgcagcatccagcacatcaacacccgacctcattttcgccatgcgcacctcacgcaggtccttcagcagtctccgtatctgatccgggtccacgagatcatcgctcgcggcgtcaagcagcatattcccaacctcaacccagtgatatggtagcgaagggggattccgtgaagatgccacggtctgggctgtgttttggggtaagaaaggcggcgctgcatagtaccgattaccatctggtgtatattgcggccgagcagatggcagtgcatcgcggtccagaacacttggttgaccaggcaggggaggaggcggggagaaagcgtttttgtagtcttggtgttgggactctacttcgaggatgagagctaatggctctgggtgtagccatgttggtgggataatgtttgcgcgacgttgacgcttgaggaggatggcgagccagagggggagggatgcgcgtcggggcggtacgagaggttcaatggggccctggggatggttagatttgagtatttcaagatagagcagttcggaggcgcatactcctagtagttcgaggccttctaggcgctggcgaggcacaattgttactgtttccatctccgccaggaaggcgatttctgacgccgtgacgccccggggaagaggaaaagccattgggcgtgtgaataggaaagcgaaggcaatttcaattaatcacgagagtcgcgatctcatctctcttaggatgatctaggtcgtcttgatcgtgcgctcgaccttgaccgtttgctctgcgtttctttcctttcgctttttttcttcctcttattagaccgtttctctgcttttaaaatgctcaattgacttttattgaatgcttctttcaagtcgcgtcgagatggcgacttcgaaacgttcaaaacgtttgaaacgtttgcatcggatgagctccacaagctccgactgggacccggtggccgaagaactgcagatcgtctggcaactttacctgcttgctgcaagtgattatttgcacagcatggccaatcctctagaatcagacctcagccggagtgctcgatggttcgttccgtttggcttggtcttgattcttttgtgggtgattcttgtcaataagactgtccccgaagcctacctcgacgaagtcttccacgtcccgcaagcacaagcatactggtcgcataagtggatgcaatgggatccaaagctgacaacaccaccgggtctatatctgttctcatatgccctcttcgctattgtgttgctgctgcgcggagagccgacagagctcactccacaggtcttgcgctcgacgaacgttggtgcgacaaccgttattttcccctggagactccagaagttgcttgatacgctacagagaacgacaaatactcggccattgggagcgaacgtgtctcataccgtgctgaatatctgcttgtttcccccgctgttcttcttctctggtctgtactacacagatgttcttgctttggtggttgtcgtggaggcatacaattgggacttgaagagagactttgagagaaaccaggaaagcgaatctggaaacgacgcgacaaaagcgactcgcagtggtattcaggagacactgggattcctggctttcgcgctggctgcattggtcttccgacagaccaatatcttctgggtctcggtattcctaggtggacttcaggtagtccgcaagattagaaagtctactacgccatgcatgtcatccgatgtgtcaactatcgtgaaacaaggcctgcagaatgaggtgtatgatcctctcgtttcggaggcttccttcgaaggtgagttgatctattggatatacaatatgacgcaagcaggagaccattctaactaaatctatagattacctgaagaccgccgtttcacttgcgactgtcagtctgaagcagcctttttctctcctggtttcggtcattcctcacatcatcgtcctcgcggcctttggtgcatttgtagtttggaataacggagtcgtcctaggtaagggtgacttgttttgtcacatcaagtgcgattttactgacagttactattcactaggccacaaggaattccatgccgcgggtatccacctggctcagatgctctacatctggccgtacttcatcttcttctcatggcctcttttcgtcattcctctgatcaatattctcgccctcaaaccactccccaaatacttgaacctcggtctcccgccgaaacagaggaaatatcccaagctcaaggctgccctgattgtgatcccgtttatgcttgccgtggtccacttcaacaccattgtgcaccccttcacccttgctgataaccgacactatgtgttctacgtattccgcattcttatgcttcacccagcaatcaagtatgctgcagtgccagtgtatttcctctgcggatgggtcgtgatctcagcctttggatttaccaccatccaacgtccgcccaaaaccttgcgagttcataaagctgctccagatgcgcccccagctccgactccggccccggctccagccccggccccagtggcacaagagcccaaatctactcagtcttctgcgcgcaagcctttactggcgcaccaacagccaccaaagggaacgaagaagcctaacaggtctaattacaagaaaatcaagaaggatgacccagaaaccaagaagactgacttgactgagctaccagcgaagattacggatccaaatgatcccgcggttctggctagagtccagcaacacatcttcacgcgccagagagaattactggaggcaccacgcgttagctttgtccttgtttggctggccgctacctccttgtctctcatcacggcaccccttgtcgaaccccgctacttgatcatcccgtgggttatgtggcgtgtgcaccttcctcctacgccatgtctgttcagggatcgagatatccgcccccgcacagaggaagctaaacgtcgctctgacctcattgtcaacggaccgaagttcgtggagacggtttggttcttgatcattaatttgatcactgggtatctcttcctgtacaagggctttgagtggccgcaggagcctggcaagatccagcgcttcatgtggtgatatctctgtatctttttcttttgatattagttttggcctgccttggtctggtcgcttgtacaatagaaatctaaatttgctagtttactcttctgaaagccattgagttttgttgtgatattatcttggtgtatccaaagcgagcttcattgtgttcggtgatacctacatgtcccgcattccaatcaactatctaccaaaaatagacactcttccattccatcgtatcgtcaattatgtctactgctggctcttccacgcggtatatttgcggtaaatatcatggcggaaggtttgctttagctcggccaccaactctccatcgaccggcagtgctgcctggatggcaccgacaccacagagattattcttccgatcaatgaaccaagtgagagtcaaaccaccaccccaagtcaacgttcgctcgccataccagccgtcaacatcctcaagcgtcagcaaaccgccaaggccatagccaaccttcagctccgaatctgttccaacgcggaaaaagggcccaagaggactagcaagcgcagcttgatggcttgccgccgcctcggggccaaggtgttgctgaaacatattgtcgacgacagcaggcgtgagcaacttgccatcattagccagcagcgagtgcagaaccttaacaaaatccgagccaggtaagaacagtccatgaccgccaaaggcaccacggccccgcaggttcatctcgccgccaccgccgagcacggcactaccaacagccccagggtcactgggattgagatcgacgagacgggctcgcaggtcctcacgggtagcgggatagaactgagcatatttgataccgagcgggtcgaagatacgcttctgcatgaagtctatcagcgagccgcccgtgacacgctccaccacgcggccagcccagtcaagaccggggccgtacatccagccggcaccgggctggaagctgagcgggtaagtgaacatctcctcgacgaggagagggtcgtcattctcgggattcccaaactgcgcgcgccacttggcgatgggtgggttcaggaagtggtaggaggtgccggagctgtgcgtaagcagcatcttgagggtgatagggcgggctggtgggtcgagctgagggcttccatcgtcggcaaagccagtgagaacttgctttgcagcgagctccggggcgatggatgacaggtcgccgtctagacttagtaggccgtcttcgacgcactgtagggcagcgatggttgtgatcaatttcgtggctgaggctaggtacagcacatcgtcgagctgctgtggctgcttctggcctgagagtagagtgcgctctccgatcgccttgttgtagacaaagtggccttcggcatcagtggcacagataacagcgccgttgatcttgccggcgtcgatggcggattggatactagcttccatattttttggtgaagatgatattgatacacagggtctatcaagttagcaggagggcttaaataactatgtagaatacctacaacacaggtatcagttcggcgtctatttttggatgctcgggctctcttttgagactaagtcaaaaggttattgtagtactccgtacaatatacatcacatttcaggccgttcccaccgcctatattctacctataacaccaataaggtggggaaagacatctcaacagaatgtctgatctgagaacatctaagagcacaagcaaaaacacaaccaagatatacaagtgtacggagtactccgtatatgtgtgagaactgtgaaatagcgcccaggcactacagatcaaatatgttaggcggtctgattctgccggtcgaccaagctgttcaccgatcaggaaggcggtaccattatgcagaaaagtggggttatattgaactgtaaggatgtcctttcgcccttcggggcatacggtgaaaagaaaatatacagagaagattagcatggcccctgcactaaggatgacacgctcaatcaaagagaagtaacccattttttttctcttttacacgagctcaattgatgagatagagtgcaggctctttgtatacattattctactactccgtatatatttgcagatactacgcatactacgcatagaagtcacgtgttaatcgccgttcgactctgcacgttgtcggaaatggtggttttatttaagctctaccaggttcacctgttaactcctacccccaaatatgagtacgctaataggtgttcctgccctatccaagttttgtttatacattcattctcattccattgtttgtcatataatctgaaatccaggtaggggccaaagtggtgcactcttccgccagaataggctgtgaaaaaggtgtaaaatgtgtaaattgaatttgtctctgcgatacaccaatagtatcgttgatccgacgatcatcagaagaatataaggagccaggtttatattagtacaagagttcaaagtatagagaatgatttggagtatagaaagcaagctatggagaacatgtatcactgggtatactccgtactggggtctgttttagaataaggttgttttatgtgggtccgctaaaaggatcgaaccagggtcccagggccacgggataaccttcgaaagagatttatatgaaccgtgttaagatattcttttgagacggtatatgaacttattcagttattcagtctagaatatacttcctgcatccgttgaatgtcatcgaaattgtttcgttctcatatttccaaaacttcataacggactagtcattaacatgcaaaacccaacagcaactctatttttttggcgcacacgaaacggaagattccacgggtatttgtgtccacctagtcttcatccatcgactcccagccatcaccaccacggggctcaccctcatcaccctccccctccgaatcatcagactcgtcatcatcagcattgataccaaccgtgcgctccgggacatcaccagcaaggtcaggcatgcgagacacaaaagcacgccgaacagcgccgttagtcgaagcatcccagatctgcacattacccttgctaccagcaaccgccaaccggaagctgacctcctggtcgggcgcgaaggtagtagagaacaccttgccgacctcaagcttgcgcgtgacaaccaaagtgggcttgtcattctcgacgctccacagcttgacggtcttgtctgttgagccggtcaccaaaaagccggggatagagctgttgatgtcgaaggatgaaacggaggagtcgtgtgcttgcagagaccagacaggcttggactcggcaggggtggcggggacattgcgcatgtcgtagcggtagaccatgccgccgtcggtggtcacgtagaagaagttggtgtcatgcgggtcccagcgcacacactcgacgtctgcgtcgacgccccagcgcgcctgggcgtccggcgcacgcatgtctgctgccactacggtgcggtcgtaactgccgcttagcagaatggtggactcggctgggtgccagtctagtgagcataccttgtccttgtggttggagtaggacttggcgcaggtggcggtgttgagatcccagagcttgacggtcttatcggctgatgccgaggcaagcaggttgcggtgctgacggttggcagccagcgccaggacggcatcgatgtggtactcgtcgttggccttggccttcttcttttgcttcttcttcggcttctcggcgtcctggccaccctgcccaagaatcgcgttggggtacatgcagtccactacatccagatcccagatctcgatatcgggctccatggttccaatagccacgaagtttccttgcgtccgaccttctgggttcttgccaacaggaatatcaagccactctgtgcaaagtgggataccgggaagcatgatgtcgtggtgcacatagaggttgtccgctttgtcttcgtagacgtagacttccaagtgcgcaacttcgtcctccacctttccggccaacagaaggttgtcgtagggcataatctggagctcctcgcgttcttcatcatcctcgtcttcggggatcacgaggtacgggtcttcctcgttgggctggtggtaggccagggattggacattgccgaacatggtgatcttctcgccatcttcatcaatctcctccttgtcgtagttatccatgtcgaattccttcaacacatcatcatcactgttaaatccgattagcatgagttgaatctgcgctgcgctcaacatcactcacgtctttgaatcggtgtccttggccgaggtcttctcctcagcatcctcctccatagcatcatcgccttcatcttcagaaccatcctgggcagcattcatatcatccttcgcatcctcgagctgcatgcgcgcaagcttagatatacggctcatctcggcctcgtcaatctcatatttggtagggaactgggcggcgacaccacgccgcacccatgtcgtagttgtaatcatggaagacattatgaaaatgttgtgacgaaactgatcacacccgtccactttttttctatcggcgatatttttttttatcgtgcctgaggggctgtccgcccggcagaatccggccgatctccttaccgcccggacgttttgcgatgttcttgctttgcgttgatcatacgattgaacttgaactatctttcagttttcagagaccagtgccattgaaatcatgcattctcatctccatacctcttacaatgccagtacgtcgagtccaccatgcccggaagatccatctcgccatcccatcccgctttccatattgactgatatcacacagattgcgaagagatcatgactgctctagatgagtgtcacgccaagggattcctacacaaagtcatcgggagctgcaacgatattaaggtcgacgtgaacaaatgtctctccgctgagcgatacgagcgtgcaaagcgcaaccgagaggaggcgcgcaacaaccgccggcgtatggaggagatctgggccaaagagcgcgagcttgatcaagagcaaggagggcctgcgcttgcggctgctagggcggctactgcggcggcggcggctaatgctagtgctagtgctgcgaagcaataggctgtgtcgtggatgagcatatgctatcatatatgccgtcatgtttgggactggagtttggggtctgctttcaatggctgttcttcgatttggctcagacttgaaagacagcactgctgcttgttattagtagccttcggcatggccccgatttcaatatgttcacgtgagaacattgaatgcacgggataagcagaccgaggccaaattatctccttttatttcatctggggaagaatactttgtacgatatctgaacgttgaaatgtacatatagccgagtgaccttcgctctgtcttctttgccatatttcatctggcaccaatgtccaacacttaatctacagtttgttggggttataggatctcttgaatgatatcagatgtacattactattatgcacatcagctgaacttttagatataacccatccgatctgaacgccgcaccccagaagtgaaataaggttgagaatgcatgcaatgataaccagcatcatgaatcgcctatgccgtaaagattcaatcaagcgtcaacctccgtagcctcattaggctcggtggcctcctcgaagtcttcacggggaccactcttagcatgacgacgtttcctcttgggcttagccgctgcagtatcatcgccatcatgttgctccgttgcatctgcgatatcaacctccttccgagcaggcttatccttcttcggtgcaggcgcatcagtcttcttcttagccttcttcacactgagaggattaggcgccttgaccctaggaccgcgcttcttcttaggttcctcctcatcagcactctcgccatcagcctcgccatccctcttgcgcttgcccagcatgggatccgcatccaatccagcgcggaacttcccacgctcaacaccatcccgcaccatctcagaagcgctgctcatcggctcgaggaccataaccgagcgcttaacgtatatgataggcacacctggaatagagcgagcaccggcgcgtaatgcgcgggagcggcgcatagcctcctcttctttacgatcctcttccgtcttccgtctgcggggctggttctcgctattggtcgtctttctcaagattggatccgcacatgcgagaatgtagtgctccttgttcttctttgagtctgcgttgggtgaaagcagcgagaggagacactcgacttcgtcgatgggcgtggagtccgcgttgtgcgagcagtggcggagcgggagttctgtgggcggaggaaggaagagaggtcggtatggcttttcggttttggggttgatgggttgtgcggccatgatagcggcgagtgagcactttgttaatactgtcgagatggttagctgggatgtgtcttggtggatgggaactttgtctggtgagactcacgaggcttgaccttgccttggatcgttctttcaagtgcagggattagttccatcctgaaggagtcggtggcgcgaaggaaattcgagtcaactgtttgagcgcaagtcagtactgtacaccagaacaatatattgaatgggacatacccaggacctgataggcctctcggaaaccgaaagtgagctcatactggtgcataagcttgcgatacttctttgaacgtttggccctcattgtgaatgatgggtatcaagtatttgaagattgaatgcagcaaaagacatgagcttctgcgtcgaccgaaacttttttcattctgccgggcgggagcggcggtgatgtggtctgtgctggtggtgaggtacccaatactttgtgaagtggggcgtctagccttgagattgagtaccctgtacttagcatttactgatcgctacagacttgaatagttatgaaagaatgtattgagtcaaggaaatattattatttgtcttgtttagacttaagtagctatcaacgatggacagactagccacatcgcgctaagtaatggagtccctcatgggtgtaaatcgaaggaaatgggtctcaaaagtggtagaggggttgttataggaatcaccagcttgaccggttggcatcatggctttggtgcaaaccgccaatgcacaatgtgcgcttgttagaaagttgcccgagccgatggaagataccaacaggtggggacatgatgaccaggcaaagctaagcaatcaagcttcgcgctggagaactcgagtaacccagctggcatggaagccatttcccgtggtttgatggggtgagtatttcactgcaatgcatgtccgggtcctgattcgacgcttgcaaggcatcatagctgcgcaagagcgatgtagttgggacaagcttttggcggtagatatgtgaatctagatgatagacggggaacaagagcttgcctcgtgtgtcgaggttcgtcaatggcaattggcgcacgtccgaggcaaggagatcaagacgcgaaattcaagatggatatttgtgaaagtctgatcgtaaaaccaatgggtgcatctcatccatcccgtttcttgcaagatgcaaccacaacagagatatcgtccattttccctccttgaatagccagaccctcatccactgccttctccatgtagggactctccgcaaagggatcctgggcaatcgtgagagcagcattgagcagttccctagcaacatagacattgcggctatcagacagatgagggtgctgcgcaacattcgttggcgccgcgcgctcttcctcccatttgtcaatactgtccataacgatcttcaggacctcatgctcccataggttatccatgacgccatccgagaaggccaggacgatgtcgtcttcctgtacctcaattttggacaagactgcatctttccggggtgtgtcgatactgtttgttccaagctgcatggggcaatcgaaccaatgccactgctcggctgtgcggaaaatgacctttttctcgctcggtcggatcacgaggattttgcaatcgcccaggtttgtaacgtacagcaatggcttctgtgtgccgtcttcgccctcggtccagtgtattatggcagtcaccgaggttgtcgtgccgagccactcggtaggagatgtggttgcccgcaaggtctcctcgaatgcatactgcaggtatccgaccgggtcgatggcaggcgtgctgtggtcgacattcctttcgacctcgagggcccagaagtgtaataggagtctagaccagagtctgtatcggggaagagaaaagtcagcgatcgtggcatatgataaaaattgaaattgagaccactcacgcagcatgaccacgaggtttcgtagcccaggcgcctacgccatcgttgacacctatgaaattctctgcgacgatgatggcatcgtctccgttgttcaggccacggattagctcgccctggacggataatctcttatcctggcttagcccgtgtgtcgtcaaaggatccgagaaggatgaagagggtggggagaggaaaggtggagggaagggtcgtgaaggtcgtttggcacatagagcgtagccagtctcgaatcgaaaaggcgatttgggagaaccgactggctggtcgggagtgggagtggtgacgccgtaggagggccacactgccgccgcgtgatatggccgtgctgtgctcggttgtcggaggcgggcactctggactgtggcttgatttatgcttatgttcacgatccacttgctaatggacgtccatgatgatgatagtgagtgtgacacggccgctgccttggtcaccatccctaacttggctctttgtgcaccaagatgggctcggcgaaggggttctggggcattaaggcatgaaaggtgcaaaatgaagagacggagtacaagagaacagtagaaaagaagttttgactcggacctgggcttgagggagagaaaagaaaagtgcgactcaccggtaaaggccgagggtgtctcgaagatatcactggtctgcgccgccgactgtgccttacactacgtagtatctctgagaatatgaaaatcttagaaatcgcgagtttttagggttttattcttcttcttacttcattctttcattctttttctcattctttctcttatttccgttacatttgtccagaatctatctttttttcagagcagttgaaccccgccactcttagggctacatccacttatctatatccctgccgatccaatgatccgctcagaacttgtcagaacctgtctatatatatccctgattcgccctattgacacatatgttgcagaagagaatcgagagcaatctcatagttcacatgctatcagccaaatcagagcaactacatcatgacctcaaagtgaaccacaaaagcacacatagcgaggaatccgatgctaacccagagagcccaataattctggataggaacagactaatgatcatcggccactttcgcgggtggcttcaagcagcaaatctataaatgtcttttggtcttcatccaattgcgtcatacttaaccactactactatatgataggcggcggcgaagcctgagcttccgagggaccctgtcatgtcacattctctctgcttcattggtctctttacttattctatcatacaggtactcaccaagaagtctttctctccttattcttatactaaccttagaagccttctgcgaaagaatcatgggattctcgaataggagtatgacttggcacttcgcgggcgaaacggatgtctgtctacaatacgggttaaacacagaatatctcttccggttccgagccatggacttatttcttgcagagcatgccctacttgaagtaacgcagtgtgaggaaacgttacaccatagggttatagccttacagaaggctacagctatcgagtctaatagggcccagcttgaagaagcaaataaacagctcgaagaggctcaagcgcaatacctagaaaaagaatacgccctctatcacgcagagtatgcccttgatatgcacgctaaagatgcttatgatagcttaaggcgtgatgctaaatggtttatgcgcgaagaaatggttcaggattgttcggatcgaggcggctgttgtagccgggaatgtggatgctgtgaacagagattatctttctgaaaggaagaaaggtagaggccattgcactgtagagtgcgggtgctgtatcggcttacgaggattcgagctttcaaagaaagacaaagaagaaaggagcaaggacttgaaaactagtcttgaaggattgtattcggcctatgctttacatttggcaaattgctatttttgcccattaaggaaaccctggtctaccgaacagatcctcatcatatgcttcatgtttacttcctcgcttattggcttacttgctgttatcttgtttacttgaatagattgtttgttagatagctacgcgagaagctttgaggattgcaacatttgcaaagtaatcaactggctgcttccaactttacagcttgcttcttctttctctccatcttagtgattctatattgaaagcgctcttctatctttgcaagacctggcacgtcacaggtgcagtgagaaatagttatgatgatacctataccttgctttagaatcatttgctaaaataatagactctttttattgtaatctatacctactcactatgatacactcggctgcatagatgtgttcgtacttacacttgaaagaaaccatcgccggtatgatctctggttcttcatctgcagaacctcaagaatgtcagcaaggcccatccatctatcacaccgcgataaccattgacggcctgattggtatttccagagacggcaaacctgctcttaacgcagatatggtccagtctgtcgacccatctacacaggatggcatcgcagttgtcaaatagcgggagtgtccgccaaggcgcctttattcgtagaggcgctctaccagtgcgggttgaacgctatcgatggcagccatagtattctcgccccggctatgtccacctggtacctctctgtagacattagagcagaaaccaaggaaatcaggaatcaaaattccattaatgataccaaacgaaaatacaaaaactaacgagtccttgggaaaccatggttatataattaagagacaagaaacaccaaggccaaaccaggccaaaccaatagtatgcaggtacattataagcagggggtgacggcctgcgggaggagaaggatgagcagatccaccatttcggccggttccggggtaggcggttggaagaaaacaaaacagaacataatcttttctgaaatatcctcttgctagtgccgtggccgaggtattggaagacgtaggcagcatacagaaccaccccgaccacgacaccacatccttctctcaacgcctaatcactgcccttgtctttgagggcgtggaagatgtcgggaatggttccgacatctccgggctgaggagccgggcggcatttctgcggtggcacggcaaactccactgactcagagtctgcgttttgcactaggggaagatcgtcactggcgcagttgtcgtacgggacgataagacggggaggggtaggcttcttctcttccgcttcctgctcgcccgcgtccacctcgcctgtcgcgggggactgggccgtgcctggctgaagagagagggccgttcgggctagagacaggcacttttagtgagtatatgtctctcttccaaggcctacacctcccacgggtactttcaaattaccccaccaacgactttagccccagctcctcatccttctgttcgaagtaattccgttggtagttctcgagggccctctggccatggaacctacagacataaccttcagcacgacaggcatagcaagagagaacgaatgagacatcacataccgcaccaccaatatcaaacccaaaaccacaaaagcgaggccaatgaggctaatgaggggagctttccacggttgtgggtatctctccgggcatcggcattggttggcattcgactccattttgatatgatagatgatgtgacttacaggcctatagttcacggggggtattcctatatgcccataagcaggtgtgctcagaggcaggtacatctgggggcaagcacacccggtccttcagatcaaagtgagtatcgcttggtttgatctcaccctcgcctacgggcgactatgtgtgccaccggtacacttctaaggttgcatgttctagatacaattgcttcaacttgcctatcatattcaaaatctataaattaattaacaaaactccactagtgtatgcttcaactggtacattttctatctaaagaccaacaggtagtacaaaaaaaaaaaaactaaaagtcagagaccctaaaaaagacatcagaaaagccatatatggaatctgttaatcatactgtcgagtcgtaaacaattgaaccgtaggtaagcctgataaatagaggaggctctagatcccgaccaatcaaaatgcaattatctccagggttggccgaccttattttgacctcatctccacagaagtacggtttgtctaacttcggctgcatcttaaccggcctggcaccaatcgtcgagctgactggaagctggagagagcttcaaaataccacaagttaccggcgaagattatttcctcgtcaatactaagctattattattaaggcaggggattagtgaagcggggtaatccaaaatctatcacttattatgggtccctagcctcgtgctctattgttgatgaagttaaaccgtcggatatgggataggtgagtctgtacataacatggaatagcatctgggggttaatcaagattcattttgaaactggatatgtagacttctcgtggtcacttcatcaaataaatgacatggttcatgatcagtttcatatctgtcaaatgatattatttccccttggcttccccttgcttccctccgattgtttcttaacaatcccccggtgggattgactaaccgttccttctttcctcctttccgttatgactttgaaacgcggatgaagagaacccatttctctgggaatcctcgcttgtagtccatcagctgagctgaaatgtgaatcgtaaatcgtagtcgtagctgtcgtaatcataagtcgtggttaaagtgacaggactgcaatcttagaagctttcctgggagcctcccctggaagtcatctcgcgttcccttgcaatcaacagagaaaacagttcaaaagcatggttcaatacattggcgatatcagcagccttgacatcacgtttgagctcagccaaaccttcgaagaacatgcgagcagtggtagaagcagtagcagggaaagcaggagctggtagattccgtctgtatgcaagaccacgcttggtcgccatgatgcgtacatgtcgttctgcacaaggacagtcgcggcgattcttgtcggtacactcccaggaacatccacagatagagttgcaaatgcactttcgtcgcctggcaaggttgtaaagtctagggatagactccgtcctgcgcaattctccgatggttgttcccagacctttagcagtatccgacaagcggttatctttcacaacatccgtgtcccagacagtcgttggcacatcctccaaggggatccatggcagctcctcgaatggaacgtcgtcaggcggaatactcactggagtcatagtgagatacttctccgacattactgccatggtctctgctgggataaggtcaaagaatgggataagtcctttccatttctgacagtaggctccctgtctgtaggagacagtcctcattgcaaatgggcggtatccgagggggtcaaagaaagggacctcattctggctcttctttttcataatctggttgatgtatccttgttggaagtaggcgatgatgtctgtccgaaggattgcgcagatctctggagagtctagtacttccttgaacgctaggacgatgcggtagagatgatcagcctctggcataaggaatggcatctcaacccgcaatgcactagtgtcgactgggtaggaaccgcagagctcaatgcaggccagctcaattgttatgcgcgcatatagggcatagtaaaggttttcgacagtgtcaactagcacagcaatcttctgggagcgaatgttttgctcgctgcgtctgatccagtatggcagaccggtctggtagttgtccggctaagagtggaaactcggcgttagctgttatatttccaagaaaaaaggcgtaaaagtatgggacaagagtaaagttgtaagctcaaaatatacctcggcgccgtaatacaagaggataatctccatcatcttcgacattgtatacaacttgccgaaaatgcgcacgatgacaccgagatgaatcgattcctcaacaggatccatgttttcggggaccacgagcttggttggggttgtgggcgagggcactgatgggaccatgacccaatcgtcactgctgacggtgtagaggcgaaggcggcgctggccgctagatgcgagctatcataagtcagggtcaaatctctcaaaagtgaaaccaatgcatgacgtcaagtcagttaccaatgtctcagagaatcctgatctgtcaacaagcgagccaaattcgaagggtgttcttccctcagatatagtggctgaagttgaggagatcattgaaggcatggtcaagctgctgggagcttcggccttccgggggtgatcggtaccgtctgagactatggacaatgcttcctccacaattgactggcagtacttgtagaaacgtcccttcatccgttcaatctcctcatgtggaggggcctctccatctttgacgcgggcacaagcctcttccataatggccttggtggcctgggcatacgcatcaatacagttcttaccccgttggataaacaaatccaagtcctttcctgacttcagagcattcaggcgagccatggaaatggtagaagccattgctagaggatcaagattggcattgtccgccatggggacagttgggagaggagtgggtgggaacatgaattcagaataaacaggggcatcgtccgacacagggcgctggaaacgaggataaacaagctgtttgtcctgggcaagcgcacggggagtctcttgctcacgtgtagcttgagttgcagactgcgaagactgcgaagactgtgaggtctttcgtagtttgccgagagcagctccccatataccaggtttgtggttgttaaccatgttgaatttctggtgtttttgtttttcaatcacagaatctttgcagtgtgggattgtgggagaaggaagaaaggaaagggcaggtacgtgggtatttatacttgcccagatcatcagtacaattgtccactcgctcgatcacatatggcgaacggtccatatcaggcaggcgcgactcacaacggcaaacgccgcaacacatttaaccttaaatgggcaggaccaactgcgcgcttcgaagcctgacgaaacattgtgcatataatgcaagtattcatagatgtaaataggacatgatttcgtaaacgcgttcttcgaacactggaagcgtctggagaacctattcgagtgttggccaaccttataagccaaccttataactgaaagcacctaggtagatccatggatgtgtgatgtttgcccaatatatcggcaagccaaagccaacacctttccaagtcaggtccgtatgagactatcatcaacgaagtgaagcaaggataccggacatcatcacctggtgcttgtggggcctcatcttcatcccgagcttagctttggcctctttttcggggcttgtctcggttccacgtacctgtaaggctgatgtttccccagccgggtgcttcagaggctgaaaatctggagatcgacgcagttcaatacaacatgctatatacaaccaccctaccagcttatcagaaccggagactgtcttctaagagggcaacatgaacatccacctgtgtacgttccagatcgcctaggagcaaatgtgctgctaggtagcatgggaacaaggaaaaagtatataaacaataacaataaacttgaattggctcatacaaacaaagaaactcaaggctctaaccctgcactcggaacgtacgaccactagcagtcttgcgctcacgttcttcattctctggccgggctcggttgagcactgttgcgagttagcagtgaacatgctttctttgctcagacgatacataccctggaggaaatccgctgtccgcttcctcattcgagtgtggatgtaggcctgcaaaatgtttagtgatcaatccctcaacaagaccgagagaaactgcatacctttgaggctttgatgtggtagtggaaataatcacggaaggtctggatgtgagagatgttttcataacgacgctgcggggtcaggtgtcgagggaaaagaactgcaagccgagtcagtaataaaatggagattgatagcgcaatatgcatccataccgaaggtgacatagctaacttcgcctccagtagcattcagaccaggaacgtttgcaagctcaagaggagggtcgttacggaacaggacctggggggcgttctggagtgtcaagacacgtcgccgggcgtcgacgaattcctatgggctgtcagtcaggggttctcataaatggaccacttgtggcaaagtacgaacctgcaggaagaccttgccaaagatccggtctgtctcctcgcggaatacggtgctgaagatcactgtgactcggtcccagttggccttgatatagatggcctcctcttcacggtagtgaatagccataacttcaccgccctcctggataccctgtggtgctgactctgaggtgtacctggaagcctcctcggcgagcttgttgaattcgtcgaatgctttctcaaagggagcagccattgcattccgtttcaggagggcaaggttcataatcaggtcatttcgggcctcctcctctgcgggcaggttttcaagatcgatttgtaccgagaaatcatagccaggctccggagatacaatataaggaccgtattctctctccaacacctcctgagctccatactggaccagttccttgtagcatttcacattgatcgagatgagaatcttggtcttagactcgggggtagaaaggtgaaatgtcacaccgtcgaagtcggaaaccacttggtcaatggaggttgggggtgctctgagttcggcatgttagctgggtgcctgcttcggggttgtgtatacaatgcgcaggatcgcatgccgagggggaggaataaaacatacccagaaaagcgctccgtaaggagtgactggatcaaagcattctggtaatctaagagaagcatgacgggcaggacaatggatggtattcagtgcagataggtggctgttgtgaggtcgaccgtgatcgtcatgggcggtgggggagccggagaggtcgctgtcgccgcccgtattaattttgtcctatcgatagcaatcggagattccaaaaattttcccatccaccctcaacgatggtgaaatcatacttgtacgtacgattttaagtgatttggaatcctctgatctaagcgctaacccttacacagtaagttcgagcattcgaacacattcgggctcatcgcctcggcgtcttcgaatgcggtttgggccaaagatgaccagattggcattgcacgccagacgggcgccggacgagcaattgtcggcgcaggtgaggaagttctatgttgggatgtgaagaagggagaactccttggaagatggcgcgattctgcctgcagagcgcaggttagtgtgatcactcagagcatgacagatgaagatatcttcgcggttgggtgagtgtcctctggtgtgacctagtcggatgattctctctaactattatgtcccttctcagctacgaggatggaagtattcgtctttgggattcgcgcaccgctacggtcattatttctttcaacggtcacaaatccgccgtcaccaagttggccttcgacaacgccggtgtgcgcctcgccagtggttcgaaagataccgatatcatcctctgggacttgatcactgagactggtcttttcagacttcgcggtcacaccgatcagatcacatcactacacttcttgttcccctccccagaattgctcactgcttccggattgaatgaacactctggattcctattgaccaccggaaaggacgcattgatcaaagtatgggatcttgcctctcagcactgcattgaaacacatgtggcacaatcgaatggcgaatgctggagcttgggtctttctcctgaccaaggcggatgtatcacagctggtaatgatggtgaacttagggtctggtcgattgacgaggcggctatgatggagatctccaaggagaagctgggcgcggatggtcgccgaattctcacagaacgaggaactttctaccgacatggcaaagaccgcacaattggcatccgattccacccccgctcagactacgttgcattccatggttccgacaagtcagttgaggtttggcgcattcgctctcagtcggaggtacagaagagtatggcccggaagaagaagagaagaaaggagaaggaggctcgcaccgaggagaacgcaccggaagaggataacgataagcccgaggatgtttccgccgctcctgtatcagaagtctttgtccaacatgttatcgtgcgaactggtggaaaggttcgttcctttgactggatgaccaacaagtcaagtggcttgaaccttcttgccgcaacaaccaacaaccagcttgaagcctacaacattgttccagcgaacaagaagaacaccgacagcgaggatccggactacactcggagcttggcagtggacattcctggtcaccgaacagatatccggtcaattgcattgagctccgatgaccgaatgcttgcctctgcttcaaacggcactctcaagatttggaatgttcgcaccgaaagctgtctacgaacacttgagtgtggatattccctgtgttctgcattccttcctggtgataagattgtcgttgttggtaacaagaacggagaactcgaggtatttgatatcgcatcctcaacattgctggatactatcaaagcccacgacggacccgtgtggtcacttcacgtgcatccagatggcaagtctatggtcagtggaagcgcagacaagacagccaagttttggaacttccaggtcgtccaggaggagatcccgggaaccaaacgtaccactccccgcctcaagctggcacacacaaggacgctgaaggtcaacgacgatatcctcaacattcgtttctctccggatgcacgacttctagcagtttctctcttagacaacaccgtgaaggtcttcttcgtcgactccctgaagcttttcctcaacctttacggacacaagcttcctgttttgagcatggatatttctcatgacagcaaactaattgtcacttgctcggctgataaaaccgttcgactctggggtttggactttggtgactgtcacaaggccttcttggcccacgaagacagtatcatggcagtggcattcgttcctcacaacaaggatggaaacggtcacaacttcttcagtgcaagcaaggaccgcatcatcaaatactgggacggtgacaagttcgagcaaatccagcgcctcgttggtcaccacggtgagatctgggcacttgccatgagtcgcactggtgatttcattgtcagtgccagtcacgacaagagcatccgcatctggcagcaaacagatgagccgctgttcctggaggaagagcgtgagaaggaaatggaagaggcttacgacagcacactcaccgcatccctcgagcaggaggacggcgaggacggcgagaaggcggaggccgtcgatgctggcaaacagacgaccggcactctcatggccggagaaaaaatcatggaagctctagaactaggcctcgaggatcttgaagtcgtacgcgactggcgcaaagtcaaggctgccaaccccaacgccgccgcgcccgatcgtaacccagtttacctggctctcaacaacgtctccgccgagcagcacgttctgaacaccgtccagaagatccccgcagctgcgctccaggacgctctcttggttctaccattctccaaactccccgctctcttcaccttcctcaacatctgggctgatcgcgaatggaacgtgcctctcacctgccgcgtgttgttcttcatcctgaagacccaccaccgtcagattgttgccagcaagatgatgcgccctatgctcgacagcattcgggtgtcgctgcgtcgggtccttgcccggcagaaggacgagatgggcttcaacctttccgcattgcagttcatcggcaaccagatccgagagcagagtgtcacggactatattgatgaggatacctgggaggagcagcaagcttccaagggcacgggcaagaagcgccaatttgtcagcgttgcttgagtttaggattaggtttgtgtacaagcatgtctactggcgttgtgatcattttcgacctcattatcttggaggttttctctatgttggtttccatataaaagttttatatccttgggagttgaagagaatataaggaatgtatgataattcaatttcgaagtgaaatataaccttttctctgggataattgtccactgaaatttcatagacccaagtgtatcaaagtaatagaatgattcattcaattggtctagctattatattcccctacgtgcaacaatccaagcaatccataataccggaaacgaatataaaatctgaattgcgagaaacatcgttagcgatttactccaagcaatgatctgtccaagaccacaaagaaacaacaagcatcaaagactctactcaggagaaccaatgtaagcatcgacgacagggatttcagcccctgtcatacctcttccggctcttcctattaaaattccggttctaatgcgaatctcatcatgatagagtctgtttggtgcgatgtttcccttgtagtcctgtcaggggagtttagtaccacatacctattagtgggttcttccagcttagaccgaaggtcaatctcatttattgatcttggcccacgctggactttggtgttggttggagctagagaaggggaaagagtttcgtcgggagttttgtgagaaaatttggcccggtggagctttcttagtcattctggtcacgtgttgcttttgtatggggctctactctacctctatgtactagtggatacggaatctgtataaagatttggataatgttcaatattaaatcattattcatttatataccggcatttatttcataacggtcatgattccatgtacaacacatgtggtggtgaaaaatctcgaggtatgatcaagaggacggcttcatagtcccacagcaagaacatgtccaccattgggtctccataaagctactgcacgagatgcaaacccatccaagaggcttcttatctgcaccccggtccaaagatttgagggtatccagtgcacgggttcggttcttgaaaacaaatgtatccccgggattcgctttcgcctcttcctttcgaccaagagataaacgccttttcttcaagtttcgtgactctgaacgcactggctgggtataatggcgaccagaggcggacgtggatggcgtgttggtcggaggtggtcgttctgctgcacaggcgtcacaacataagaaggtggacgggttctccagcgtgcatgttgggcagatccagggtgtctcgtatgagctgttatcggctgtgagatcaacagcttcattgcgatctgatgatggggcttcttttggaattacaggcaaatcttcggagacagcaggtggaatgtcggaagaagcaggtggcggtgacgattttgtccgaggtcctgccgggtgttcttgacttggcgtaacatatgacgactcatatttctccctttcttcttcctgtatcagttcaatgaaggcctccatgatggcccgctcgtttgcgtcatcttcctcagcctgggttctgaacccatgcgaggcctcttccgcaagttcggtgcttcggtctgtaccagaagcacagccctgggtcacttcaatacgccgctgggcagcgtcagcccggagttttcgcatatctgttcctcggagcacgcgcgtgccgcctagcttcttgccagaatttttggcaagaatccttcgctgttcagcagcggcacgagcttgacgtcgagcttcatccagcggaattctttgaccacccagacgctttccttgagataaaaagccctctccagtgtagccttttcgggctagttcctcatgctcatcgcgaagttgattccacagcgcatgaaactgctggttgtgaggaccgaccacgttgtggcagagtctaagattgattagattttgtatttttaggagatttagatttcaaatcactcactcatgaagcatggtatccaaaatctgttcaaaggggagaaattgccgttggtccgagggataccgcaatcttagacaaatcttctggcccgcgttgacgttcagacccagcaggtttcgctgccgcggataaaattcacagagcgtggccactctccaggcgcgctgtcgcatgatcggtttgaccaacgatgcgactttgcgcaggatcaagagagcttcggcttctcgggggaggttcttttcatggcggtattctgatattagagggtctagctcccgcattttcgagatttttgatcaagaccttgcacaatatggtaaacagtacactgctggtaggttactgtcttcgttgggatggcctcctccgaggccaggatctgggcaagaagatttcatcagagcatgacctatatggcggtgtaggcagctaggaacagtcagaagaacatagccagtgatggaaattccagaatgaaaccaagtttggaacatccatggatgccctgcataacgtctggattcaccccccgggatattacgggggggagttnnnnnnnnnnnnnnnnnnnnnnnnnnnnnnnnnnnnnnnnnnnnnnnnnnnnnnnnnnnnnnnnnnnnnnnnnnnnnnnnnnnnnnnnnnnnnnnnnnnnnnnnnnnnnnnnnnnnnnnnnnnnnnnnnntgagatagcggggggtgaatttgatcacgtgacatggatatacatcagatggtgttttctcagtcatatactagtagtagacacaatcctgaatttaggaagtgcactatatctaggtaaaatttgagctggaggatacttggaatgtcattcctatcatttttgtagtctcttgtttgcagttggggccatctcgtatacagatatatattcacagtatgtcaaattgatacgatagctaagttctaaaaacccaacattccgatacatttcactatttccaagcaagaaaaaaataaaaatcagggagaaaaagtcataagaccttgagtagtcctgtatacttccggcggcttccccccctccaccgttttttannnnnnnnnnnnnnnnnnnnnnnnnnnnnnnnnnnnnnnnnnnnnnnnnnnnnnnnnnnnnnnnnnnnnnnnnnnnnnnnnnnnnnnnnnnnnnnnnnnnnnnnnnnnnnnnnnnnnnnnnnnnnnnnnnnnnnnnnnnnnnnnnnnnnnnnnnnnnnnnnnnnnnnnnnnnnnnnnnnnnnnnnnnnnnnnnnnnnnnnnnnnnnnnnnnnnnnnnnnnnnnnnnnnnnnnnnnnnnnnnnnnnnnnnnnnnnnnnnnnnnnnnnnnnnnnnnnnnnnnnnnnnnnnnnnnnnnnnnnnnnnnntcccgccgtcgactgttttatacaacccgctgctcatgtgacctttccgataacaccgcgagtgttatcagcatccatcttatcgaactttcgctcttctttttcattccaacttgttctcagataaacaagatgacgagcgacgacaagttcttttttgactacgtgagtatcatagaagaagacaaagaatgcttccggcgctgatacttccttacccagctctcgtctatctccaatgacgtaaggcggtattctctcgacgtcgcagactcgatcgaccgccaagtcgactatgccgcgcacgcgatcaaagatacggtggcccagcagtcatggataccagccactattcgtccgggtcgtgctcccccaagagtgcgatcgcaaggcatgacggaccgagtggaaagctggatgactcggaatcgcgcatggacggcggctatcctcgcatttatcgggaccggcgttgtcttatactatggaaacaaaaagttgcacggaaaacggagaaaggctaggagggcggccagcggcgcgaggaaagagattgttggtatgtgttgcctacattcgatctgcattaggatccgagtgctaattctgcgattatagtggttgccggatcgccgcacgaaccgatgacaagggctattgccatggatttggaacgtcgaggatatattgtatatgtgactgtgtcttccgcggatgaagagcatatcgtcaagtctgagaaccgtgtggacatcaaggctctctggttggaccttacaactgtaagtgctgtttgtgtatccttcattcgcgataaataaactaacattgtaactagacatcatcctcgccggccgaaatccatccttcgttgcaagagattcgctccttgatcagtcagccacagtcacccatcgccggagtgcccccgcacacctgccaactgagtggccttatcgtggtcccatcgaccaactatagtgcaggccctgtcgcaaccatcccgccgtcatcgtgggctgacacggtcaacacccgtctgctctcgcctattctcacagtgcaggcattcctccccttgctgaccctccgcagcaatagcagcactattgtctttgcctacccctccatatcatcctcgctttccgcgccgtttgccggacctgaagtcgccacaacccgagcaatctcaggcttcgcggcctcgcttcgtcaggaactccgtctcctcgaacaaggcaatgtggatgtcgtcgagctgcagctgggcaatattgacctaggacctacataccgacatggccagagtcagatagcaggcacagaagtccttgcgtggaatacccagcagcgagccctctatgcctcacagtatctgtccagcgttgagcaacgcccagttgcctctgctggtcccagcaccatacgcggatcaccggcgcggaaactccatcacgctattttggatgctttggagcccacctcgcgggatatcttcggccgtaaagtgaccaagaaatctgtcatgtatgtgggccggggagctcggtcatacggcctgattggggcctgggttcccagtggactcgtggcgctgatgatggggtaccgcagtgggaatgggattaaccccgagagcccgagtggcagcggcagtgaaaccagctgggagagagtctagacccgtgtacacatctcgcttcattggcactcccatctttaatatatcaaaagcacttgctttgaataatgcttttctatacataatatcatcggaaatactcttcgctcttaatgattctattatccctaccacatatcgacatatagcattaaacgccatagaaatttattagattagttgctacctagttggatatcattcatatgatgcagcgccatcctcactcctatcagaagaagaaaatcgacctgtcaaatccctctaaaccggcacaaccttcctctcattggacgactcaccaaaacacgcatcgctaaaagcctcgtgtgcgcacagcgggtcccgtgtcgcccgcttaatcccaccgcgcgtcaaacgacgacgcaaatgaatcagcgcccaggaaatgacgaagaaaaccaggaccgcagccaagacgccgaaacagtatcccgtcacaagattgctcttctgcccgtggtcaccgacgtcgaggaaggagtatgggtaccagccttcggtttcgtgcgtgatgtatgcgacgcagaggtagagcaggagtatgaggagtaggaacgggatcgcgatgaaggggtgcggcgctgtggctgggaggatgatttccagtagggcgtagacggagttgaggacgtgttgggagatctggagatgtgggttagctaatgtgccttgtattcgattctttttttgctttgtctccacatctgcggagtagaagagtgttgcggggttggggtggggttggattgtgatatgagctctgttcatgtggcgggggatatgttggaatggaagtatagaggcaaaatcgaaagatatacgtacattttgccagcgggtgaatggctccttgtaccacggcgggctgaagaggatagcccaaaagacaaccgtaacgagaatcgggaaggttgtgactgtcacatacaatagactgtgtagcacgcggaagacccgcggccagcggtcgaggagaaccgaatgacccgttcgtacatagtaggctgtatggatggcggcgaatagcatgtagaagccagtgccccagtaagtcagccaagtgaagtagctgaaggagtgaccaatcgaggcggggtcatcgtgggtgccataccagccccagaagatgaagatggaggcgaaaatgtacagcgagatcagaccgcgaagaccagcgaggacggcggggggtaagatccaagatgtctcgaagtggtgtttgacatcggtagtccggtcaactccgaagagagttgccaatgagcgtcgaggcatgttgttgcgcgtcttgcgatttcgttgtgccctgggaggattgaggctaaagaagtaaacaaggaaaagcaagattcagctgtacatgtaggtaggcactgttgagattggaactggggtaattaatgcttgctttttcccgcgatacagggcgacctcgcaagccgttttgcgctttaaggcgtccgttcacgaggactagagccagtcgtgcaggtactatgctcccggtctcacctctgtccccacaagcgctggccatacatagcgaaatgaccttgaaggcttgtgattgaatccaacattgaatcagaatcaggggtgagtcttataatggatgaagacatccgagactttgtctctcggaaatatagcattaggttagatacagcagtactttatgctatactactgcttatagtctcatgctaggtacagactgaagtatagtaaaacaaagtctacgtctagtcaggtctacaggccaaatatatgcgaaacaaattggtatattcacgcagtaagatcctaagtcgtgaaaataatatttctttcactcacactaggatcaagcgggtgccgcacaatggatctgaagtctagctctagcggagcattctgaacagttcctgaggtaataacgccatcaaatggcttcagcgacatttgaatgcagagggaagcggctgcgtgtctatccagccaatctgctctgaatcagatggccagacatcagaaaaaacctcgaagaacatgtctcgacgacttcttggaacttgttcaccagccgcgatctgggtcataatgaagaccctctagttgtctcccttgaacatccgtctcctgcaagataaacacaaactctctagaagttgaattacccgcttggcatcgataatttgtggattccaggaaagtcgtcctgaatgagagcttcgattgtctcagatctgaaatagaacatccgctcttagggcggctatctcatgatatttgagattgagttgaccgaaagatgtgaggcccgcgcgtgaacctaacctagcctgaagctaaaggtttagtatcttataagaaaatgatgtgtgacgtgacatagtctgaggtatagttggcggctatctcatgatatttgagattgatgtgaccgaaagataggaggatcgcgcgtgaatcagccaccagcctgaagctaaagggttagtatcttataaggagataactagtgtgtgatatgacatactctgagacatagttagcggctatctcataatatttgagattgagccaaccaagatatgggaggcccgcgcgtgaatccaacccagcctgaagctaaatgtttagtatcttgtaaggagatagtgtatgatgtacatactctgaagttggggacctccggtagaagttaatccatttgttcgttacttgaattcatcaaatcttttgtgtgatggtgtgtgcgacgatgtaagcgattggaaacatccagggagagagagtccaaataaatacatctatagttgttcagtttgtcgtttgcttacaatatcttactagctctgtattgggtggtatgtgtatctaatcatcacgggtttcaatacggtaggtgcttccaggcttctatagagctgatcttatgcagtcttgcttaaggttgttatcagctctattctgtgcaatagacggtatcactaggcaataattatacagttatgtatttttcaaaatgatgtctcatattatttacttacctgtaatatccataattaactggcgcagtggttaatgagccaaagtctgatagagatcctatacgctttatcgactattcggagacaaagtagaaaaacaaataagccaagtaaatctatagcaaaattatttaagaactagaagaagagaagcaaggagggcctatttgtcacttctcccatgcctcggccatgatccatcaaggttggcacttcgtatacaaggtttaggccacccgtggacccgggggtgttgctgagtaacctgcaacattatgcctaattggggatagtgcaaaccacggaccatggttgagttaactcgcagaggccgcgtatataatttctatggcgacatctgaggttgtaatatagcaattgcactatcaaaatagaaaagaagccattatacaacggccggaggaggaatcccttgaggttatatatccccatcccattcggaaccatttgaaacccttttagtagtgtggtacccgctctcgtggcttgcaatctaagtaggggatggtctcacttctctcaaccattggtaaagctcgcccgtcttgatttttatatatgactaggcaccagtttcttccatgtcataatcgagagcaggcatcactcatgtgaggtggtttcttcagatcagcatatgatgaaaccacccgtgtggggagagacggcagagcaactaggattctagaagatagcgggtcaacaaagcactcagtcctagggagtaggagaataattagggaaatcaatagtaggcttccaagagtatatgctctaatagaagaatccatagccaataacaatacataatatgcgtctgaatgttattcttggcgaccctcccccctgaataagtgtcccccctgagacgatcccttgtcaaacgtcgagacacagtggagtgcgactgttttattttagtgcacggggcgcgtctatttactacttgtcatcctaccctcccaaggtttggcaattgtgatcgtccgcccttcatttttctcctttctcctttctcccctctctatacctctcccccaatgccctgatctttcatttggcttcgattctgtctgtagggctgtcattcctttggctctattctatcgcctcccccgcccgaaccccctttgtgtgttatccgcaaccccgacctttcttcagacactcttctagactacttcgatgcttccggcgcaaatctcgaatccaaccgaatcgggatacatgattcactagccgactattagatattcatatacccatcatggatatgcgaggaaaactgggcgaatatcgctccaactcccacgataataccctgcggagtggctccccacgggtggcgcattttgacggcgaagttcctcccgcactttcccccctcgacgcattcgccgctcagagtcgatttctcgcccgacaactcgatgagtctcgacggggagaccgccgtatgagtcggctgccaccggcgagtgtagctcgatcgctttcgcaaggccggccgggcttctaccgctccaagtcgtcggttgatccccgcacccgcaccgaactgacccggaaacctacgcagaagggactcccagagtatgaagagcccaagcaccgccctatatccgaacatcctcgattcagctccatctccaatgctaccaccgaggctagcttttacgaggataatgataatgtgacgccgcggacagcgacgcctaatattagtggggaagcgcatgaaataccgcgcaccgagtcaccagaggatttcacgtcacgtccgagtggagcggagggtgcgcctgttgttgtggcggttgcggatccgcaaggttcatcgatcgactcatcaacttcgcgactgcacatcccacgtaccttggcaccaccggtgtcaccgcggacgcgtccatccagcagtgccaaggttacacaccatgagagttctgatgatgaatacagcagctccaatggtgggtcgacgttctccaaacctcgcaagctgtccgatggaagtgctgtgtcattgccgtattctcccatgtcgacattccctgcacgaccacaccctcgatcgccgtccttgagctcggaaacatcaggaacgggaacgaaccacctaccccgcccttcttttaatttctctcgaccgctgagtcgatcaagtacgaccttgtctgctcctggatcttcgacgcctactgaaccgatccttgcctcggaatcgaaccatatgacccgtcgcggcaagccgactccgcttctcttgcagctctcgaccgaagatgctgctgcagtggaagccatggacggcgagccgtcgtccgccatgtcgtcttatatgtacaccaagtatgcgcttccgcgcggacgcttcctttcacgggattccgtggtctttgcaggcttgcaaacacctcatttcgagtgggaagagcccatatttgagaaaacgcctccccggcattcggaggagccaatacgtttggcacggacgccatcccctacgcccccccgccaattagagcactcgcccaagcctcactcgatgcacgaagtcccagcttccaagcctcaatctccacctcaatccccgcctcaccctcagcgccagccccaacctcaacttcaacctcagactctcaagtctcggcctgttcccgactcaccagtggagccggtattacggccctctgctgagagcacccgaccaacgaacaatgacagggatgaaactgtctcttctgcggattcggctagcacagtgcgaccccaagcccccaccgcccaggtctcggcttccggccttacagccgacgagcacgtggccaagggtattgaatgccacgagcgaggatctctgagtgagtcgacgtatcatctgcggattgccgcgaagcaggaccatccgacgggaatgctgctttatgcgctagcctgtcgacacggctggggcatgcgatccaatgagaaggagggggtacgatggttacgcaaagctgtggattctgtcggattggatatgttggccgatccggacgctcccggtgcatccaaggcgaaggaattgcaaaaggctaaccgggttcaatttgctctgagcatatatgaactaggcgtcagctacttgaatggttggggtatcaagcaggacaaggcttatgctctgcgctgcttcgagatcgctggtcaatggggtgacgttgatgctatggccgaagctggattctgctacgcggagggtgttggctgtaaaaaggatatgaagaaggcggcacgcttttaccgccaggctgagtccaagggtatgagcatggttggaaacagctggtacgttcttcctgatatttacatcccgatcgacgtcattaacaagtataaaggatctacaaggacaaatacaacgaggagtccaatggacgcgcccccagtggacgctcccgtggccgaaatgccagcggagagaaggacaataagccacgcagcaagtcccgcactcgcagtatcttccaacgcaagaagtccaacatatcagaggcatagactgtcttttgttctattcacattccttttatctcgacgcgttctggagttatcgaagtaccatccattttgcattttgcattatgtttggagcgttctgagctgatctttgatttttttgctttttatagtcgattcttcgacttacattccttcactttctcatgttcaaacttttccttttcttttcacatttgcattttcatcctttcttagccgcctgggcagctgttatcgagcatggaccgagtctggtccacatgtctcgcaggcttaatacttcacttctccgtgtataccctttttcgtttcctcccatcatttgccatttttgtctctctattttcatggcaccttctcttaccaattctcttcttggtcatatttcttgggtatgaccccctggacaattttgtttgtcatatttgttctcttattttgctgaatgcctcagtgtggcgactcatgaactcatgacagaatcaagacagcgttgatctgtatcttttggacttcctaggagcatttacttgatcttctccaatttttcagtatataaagcaagtaacagggtctcagcacctgaccccccgcattgttccccggcttttgtctcggagcattgactcaaaagtgtctagatcggcctcttctccgggctttgacaccctaaaacacactggcgtccttggggttatgtttagcgcggattattgtggattagcgggggttctgactggactagatcggcttttctctccgtctaaacctgtgaatacggggggcacactccttgcatccagggtcgcctcccttggcagcacgctatgttgctgctagtgtcgccgtccaccaatgagggtcttgctcattcaataatctagtgtaacggtactctagatgagtatttctgaaaagtcttaatctcccacgacacttaggaaacgccccggtaggacagagcacgcgtcctggaattgctcttggtattttagtccacctcggctcttgtctttcatgtggtgatgattagacactcgtaacctgatcctaaacatcttgatcgcgtcttcccggaaatctggagttccccgctaaagtgccacctgaacttctcttctcctctccatatacaattggagaaattacaaaacagggcaaaataaaagaaaaccagaagaagactctatcttactgacatgcatcatatttcccctttctttttcgaattgcatttggtggctttttccaggtctataacatgtgacgctagaatataccctgttagttcttcattttaggtctcagtcttttattataaagtacggaatactacccacgctctttcaggggtgcttgtatcactctcattggttttcattcttttttccccctcgcttcgaagctcttctctctttttataggtgtttgttcgactcgactcggtttgtacatgtcttgcgtagactcttacagttacaatccctaatacaaaaatcacagtaacaagatgtcgactacaaagccctcgttcgtcgagcaggaagccagcgtaaccccgacgccaacgaagaagagcttcggcgcgcgcctcgccgcccatttcaagaaatggtggtgggtgcacctgattatattcatcgcttgtttcctgattatcctactaccggtgtaagtccactcttcctgacattcttaaccggcatgacggcccggacaagaaacatcccactcacatactactgcaccgtctagcgtctacgtcgcctaccccaagatcgcacaagacgccgtcaacgactcgaccctcgccatcacagagatgatcctcagcgacccaacacccgactccttctacctggagcagagacaagtcctcggctcgaaaagctcctaccatccccagatctacgctttcaattcgtcggtctcgctggccggtgcggcggctccgtttgcttatgttactgtccccgctgtgcagtcgaaggacggagcggaaatccacttcgagcagagggttgatctgacggataccgatgcgttcgcggattatactactgccgttatgttgaatgaggaggtttcgttgaatatctatggaaggccggggttgaagcagggtggtttgcccaagacgacggttgattataacaagactgttgttatgaagggtatgttattgttcctggtttcgtgaatctaggagaagaagagaagagtatggttactaactcgatgaaacaggtttgaacaaactcaagggcttcaatgtggccgagttcttcatcatgttcccaccagtgaacggatacgggatgaacggcaccgtgatcatccccaatgcctcggtcatgaccattccaatggtaattactcctctttccatgcatcacattctacgacactaacccaaagtagggcaacgtaaccctagacctccagctagatggaaaatcagtgggaacaacctacctaaacaacctcgtcctcaaaccaggcaacaacagcgtacccatgctcggcaaggtcgaccaaggcgccatcataaccctgctcacatcaaagtcgaatccctacaaagacggcatcctgcccttcgacatcaccggaaatgagacatcgtataacggcaaggacctgccgtacttcaccaaggcgctggctgcgaatactctgtcgattaagttggatgttctgagtgcgctgaaggcggcgggcattaatcttacgctgtgatgtatactatttctgttaatgctcatggtttatgtcctacgttctactttctatattgcactaccgtgaccgttaacagattcggtggttggtctgtgctgtttggaggtttgttcacgtttgtgtatatttaataccctttttttgttatcagtatctgggttgttacttaataagatgtccagagtgagggatatagtgcttgaaattttttggatcacccgacgactcatcaaggattagccgacgtaaattgactgactgttctttcagtaacgaaatatcccgctctagcttgttcagtataaaaagacccatcgtatttccaattctcgacttcgagtaatcaagggtgtctctgtgaaacagaatgaagtaatctagtagccaacaaaagaataagaatgaccaggaagaaaagaaacggaagccgcatgactctccagtcaccctggtctcctatcagttgacatgtgcggttgtctgattagtcggaaatagaacatatcctacaaaccagcctgcagaaactgctagatatctgtcccccatcccctcgagggattttgggacactgcacgtgatagagtttgcatgaaggctccgtttgggtaatgggaagctgagattttctgcaaccccggaaatgggataattataaccacttctgtggttcagcggtcatcaagagagggacggcgttgcccatactgcgggctattatcctgtgtacaatcccgaaaggaattgtggaggtaaacctactatttgaaatgcaatagacaagaaaaatagtgctcagcttgcccaattcaatggaattcctagcaagacagccaactagaatagccatgaaaacttgaatgttaaagttgcagaaagtccaatcctctgatagatctcagaaactagactttccaaatcttgaataaatcaggtgcacatatttattatgcttggctttcttgctaagtttccttttgcacgagctggtcactattatccttgtgttttgcttttcgaatggtagttttacctccaacctccctttcgggccagggctgtatcaggtatagcccgagggtatggtatagtgaagtgttgttcaaggtgggaggtcgacgactgttttcttttagaatcctgtattgtgctgtcggtcctctatcagttagcatccatctgtccaccggtgtagtttaattgatatagcttgccaaggtggtggcagtagtagatgattgtcatccttgaattccagcagggacagctcgctgtggcttcaagtggaagttgggaagccaggtttggaagtggaagttatcatggccaatgcaagagtgggaaagacaatgtgagagatgaagaagtaaaatccagagagatggtatttatatggcaagggcaggaaaccaggcaaccatgggattgtcttacatggggtttttcttccacgtgagcaacctgaaacagaggtaagtcaggggatatgtagttgtccgtggaaatataggtatttcatggcagcctgcatattcaagactgtctctcatagttctacctgaagacggtaagccgcagtactcgaatctgtttctcgacactatatacgagtgatctcgccggcgcgactgttctaacttctaatgctgcacagagcccctcttactggcttattggcttcacagcgacccctcggccagatcaactcccctgcttttgtcagaattcagccccttaggagaaacttggccacgtgattttacctggtcacatgatgtttcattaaaacgctatttttttcaccgctaggggagaattggccacgtgacacgcacgtatgtacgaccttgtgatttatagttgcttcgcttcgctccgcaactatacgccctggatgcagtaccagcatgggttaacctttggagacaagccacaggaggcatattatagtattgcatgtcagagcttgatagtgtctaaaatcattatctcttcatgaggcgtttcgtaagagacagttgacctttcaacaaagaattaaagaatatacacagagagtgagagcttcagattgtattactgggcaagaactagatagcttcaccactttcctatcaaaatatgggtggtataatccctaaagggaaaggaaaaccacataatattgtaagatactcgtataatgcaccctgatccgagactagtccagggtcaccatcttgattaagacaacgggcagctgccgaattatgccgactgactggtgtacctacctggagtcctcaagattgggtggtcgttgatgataaaaccgatggacatgatcaggggtcccacagatgggataagccctcacattataatatgaccactctcaccaccagttgaagcatatgctagatacccctgtattatgctaactgtgcattacattcctagtattgtatcattcctgataatctattccaacgcccttcacccacgaaagattgagctaacaagaacctcaacaaatgccaccacaaatttctgtccgtgctcctgaacctattgagacccccaggtaccccggccatttccaacaagaatccatacttcttgacaacaggaatatcacgtcattatcttcaaattacggtcgcactacttttgggtatgggtacaatcagcgcgattttgtatacgaaccgatatgaatgttcaatgaaactcgtgaattgatttgaggtatgagatcgaatctagttaaattgatcacttcactggactgtttcagagagtgcacctgcaagctgccgtagaccaacactgacatcgccgggctgaatgcagcactccaagagggctagtttccatggctccaaattgatccgatctaaggctgatagcagatcggcttgtgttttgatttgcatcgagaaaaatgccggattaagaccccggtctttgtccaattgagatgcgaacgggtcgttgcatgttcttgtatgcttgggtgtacacatggcggaagcgaatttggcatagttccaattggcgatgtaattatacggtccatcatgaattgcagactagaatatggcaaggaggatggaaaaatattagcaaaggagtcttgcttaattcaaagatggagaggaaaaaagagggaccttgaagcaggatatgtggccttagaatgaacagtaagaacttacctcgatctgataacccagattgttgaagatgaagactatcatgttggctctacttcggatggcagtacttagctcttgagcagtcatactaactactatcattgaaaggtgactcaaatctgaccctgcttgatcagcttttgaaaaacccaagcctacaccttattgggtgctgtaatgagttgaatgctggctacgctgcagatgggtacgcgcgaagttcccctaccaaagttgcggttgtgatagtcaccttcacggttgggagcctatcactgcttaatgcaattgcaggagcctattctgagcgacttaagatcataattatctcaggctgtccaagctcaaaattgctgacagaggggagtctcctccatcatacgacaggtggagcgagcaaggaccaagcactgcgtgtattccaagagttcacggctacctcaatccgtctggattccagtgaatatgctgcactccgcctagatgaagctctctctcagtgcattcataaatcactgccagtctacattgagattcccaccgatatagtgggggttgtgggcaatgcagcaactcctttgcagatttcaccgccaacattaattcaatcagaggccgtcgatgaaattatatccccactgattgccacctggaatgcagcgcaccggccgattttgatcattggtgctctggcacgcttcttcctctcgacagaagctctgatagcatttgctgaaaagctgggttgcgccgtcttctgccagccggatgccaaatcaacgctaccagagtcacaccctcagtttgtgggcacattttgggccattgcttccaagcccgaatgtagagatattgtgatggacgctgacctctgggtggtagttggaggccgttggtctgatttgcacacggtgggaggtctcaatatcaaagaggagcgccgacgtatgattaatatccaggaaacatctatacgaatgccgtatggtcgattgtttcaagatttatgcctagccaatgttcttggcgcttttctgcggtcctcaattctccccaaaagagaaacacttctttcatcccaatggaagtcgcgtgaacagaccagagtcaacagtcctgtacttggcgaagctctcacagtgcgtgggatcgtggatgttatccaacagctaattacaagcaaagacaccttgatagctgatacgggggatgcttggttcaatgccgccgatatttcgctccccatgggggcgaactttcaaattcagctagtttatgcgtctctgggatggagcctacctgctgcgcttggctgccaactagctcgccccgatgggcgaacaatcctcatgattggtgatggcgcttttcaaatggaatcttggcgcaagtacctgggacggcaaagaagtccttaactcccagctcttccattctatgggccaagagggtgccgatattatggtctttgggtgaaaagctcggggtgatcaatggtggcatcaagctcggtcggtcaaatagctcagtcatacccgcactttcaggcatcctcaaaactattcgacctttgatacttgctgaagagaagtttacgttccatggtcagcctggagcgcgtaaagaatttagtcaattaagatgagagtaaggcctcacttacctttctccatcatatcatagacttggggtaattgctcaagttccatgatctggcattgcatggcgaggtttttacgaaggaagaattccagtgcctcctcggtatcctctctggtgccaacataagatcccttgatagtgatcatgcggatgacgaccgagaagaggtcggcttttatgactgcccctggcggcaagccaactaacacaattgttccccgagatctgatgtactgcaaaattcagtttagctaaatcacttttccggacgacttattgcgtggatgctgttaggaaaaagaggggagttaatgtatcatctcacctcaacagcctgggagatgggacgatcatctgatgataccactaccacagcatgaggccctccgttggtaagcctctgaatatcacgggtgagatccttggagcttttatagtccgcaaaatagtccacgcccaatttctcacaatgcgttctcttctcagctccacttgatattgcaagtactcaaaaacccatcgccttcgcatattgacaagctagggtcccgagccccccaccagcaccagcaatggctaatatagcccatcagcagtgaacgtggatagttataacgaataaaatcacgacgaaatatacgaaatcataccaactatatcacccgcctgggcgccggtctcttgaagagcgcgatagacagttaccccagcgcaaagaatctatattcaggcgattagaaacacgccatatttgtttgagctggataatgaggtaaaagaaactagaccacttacgggagcaatcttgtctaaaggcgcttctggaggaattcgaacggcacagagttccttacagacgacgtattgctgaaaggtgccgtctctggtgtacccagaaaactgagcacttgcacacgacctctgatcattggaatcacaggatacacaagaaccacagatactgttgatccactttatgtcaagtgggctcatttagtatacttgaaagagtggaaaaataagcaacagggacaagcattcttctctcacctgtattccaacgtggtcacccacagctaaatcttcaactccctctcctgtcttaacaacaatccccacgccctcatgacctcctttagaatgtcagtatggcccttttgacacttaaaaactggataacgctgatcaagggcattgagagatcaggtgcttaccgataagacctttcttcggatcaagtggccagccccctttccacgcttgcaaatccgagtgacacactcccgagtatttgatattgacgagcacctcggtagcgccgggcacgggaacaggtacttgggtaaagtgcaatgctataaatattaaacaacgaacgtaagttggaagaatggggctttgaaaaggagtaaatttattacctgaaccactggtctcaaagacctgagcccattgcctctttggaatgtcagtcattcttcctgctttcaactcgaattatactgtatctgtcgaacggctagagaaacgaatattgagaatcgcaccaatttttgagtggaactgatggtataaggaaatggaatgttgtcattaaaataaaattggcttgagaagggccttcttataagttgagcaataagtatgaccatgaatcctgggatgcaaggtcgtgctatcactattggatcgaattgagtactccggtcttaccacccctcgtcctaccctcctccttgattattctgcattatataccaagactggaagtgattgtcttgatcgacaccgtttcagttcctttatttgtaatacaacttactcatttgcggcatttatgattcaactgtatacatgtgcaagatagaagtcttcaaaaacacctcattgaatgattcgttatcatcaagctagatgctatctctgagatcccaaagatgcacctgggcatcttacaatagaatttccgcagtaccaagtcagccaaaaggatcatactctacccttaatggtcttcttgaaaccgtttgatgttacaaagtaatatattagttggccgttctgctatctctatgggtttgcacatcttacctctctatcacaccaacgtgcgtgcctactttcggtaccacacgaatgcacatgtctagttccgagtttctggaggctgaccatctcctgcaatcgtccaacaacagcatagacaagagaattgaaccacacaatgatatcatttacacatctcaccttgccaccaaactaacgtgcgtgcctactttcggtaccacacgaatgcacgtgtcgagtctcgagtttctggaggcggaccatctcctgcataatgatatcaggtggtgtaatggctttcgtcgcacagatcattatcacggcttcacgttttgtctgccgatcaaatcaagatgcaagtcaatcatcaatcgtggatagctattagatgagtcatgtctattgaaagtaactccatattcacaagcgtaacatacaccaatgaggcttgaccgtacaccattataaaagtagcctagaatattccctcatatgtttggaaagtgaaccccatcatcccccctcgccgtatagactttacgttttgcatccagacttgaaggcggtatcagcacctttgcccagaatgtttcctcggtcactcaagcttctacgtgatgagagctccgtcaagtacaaacacgtacattgtacaactattacaaagaagactttgcatgaatcactcaaatcgccagttcaatcctcggggcttcatactgggatctcaaaaaccgtacacatagccaacttaccatcgaaaacgaccaaggttcttgaaatgaaacatcgagtggtgccagttcgtctttcggggtcttcgatatctaccaagtcaggtggacaactgaagtataccctcgatcgatctctgatgagtatgactggtggccagattgtgtgtgagatgcttcgaaggcaagaagttgattctatctgtaagttgatcctacgcaagggagaaggaatttgcttcctattttctatgcacatctcgatgatataggagctgactatatgaacaatgagcagttgggtatcccggcggggctattctgccagtctttgatgctctgcacagctgtcctcattttcgatttattcttccgcgacacgagcaaggggcaggccatatggcgcaaggatatgcccgcacatccaggaagccaggagttgttctgaccacttcggggccgggtgcgacgaacctcatcacgcctttacaagacgcgctaaaagatggcactccactggttgttctcaccggcgaagtcccaacctatgccatgggcacggatgcctttcaagaagcagatgtgattggcattacgggcccttgcacgaaatggaatacggtggtacgagacattcgggatcttgccacccagatcaatgatgcttttagaattgccatgagtggacgaccgggccctgttctagtggcactacccaaagacgtgaccagtgcggttcttgaaacccccgctagagtggcttcatcccaatgtctccctaaattgaataaccccgttttacgatttgatgctctcaaagccaaccgatcggcgagcatcaaaagaagcgcagatcttatcaacaaagccgagagacctgttctttacgcaggtaatggagtgctttcgtgtgccgagggcccgaaagtgttggcacaattagctgaaactgcctgcattccagttgccactagtcttcttggtattggatgttttgatgagaacgatccaaagtcacttcagatgctaggaatgcatggtactgcatatgcaaataaggcgatccaagcagctgatttggtgatcgctttgggcgcacgctttgatgatcgtgccatcggcgaccccgatcgttttgctcctgttgcaagagcggccggtaaagaccaacgaggcggcatcatacacttcgaaatccacccccctcatatcaacaaaatcattcaatgcaatgaattcgtccaaggagatgttaccgccggtctcactgagttacttcatcatgtccagaaggtggagagcagaccggagtggatgggccagatttctaaatggaagaagacattcccgatcaagccgacgcctccgaagcaaatgacacaaatatctcctgagtgtgttattaggcttctaagcgatcttactgaaaaattgagcaaacaaaccataattaccactggtgttgggtcccatcagatgtgggcggctcagtttttccgatggactgcgaatcgctcgctgatcacttctggaggtgcaggaaccatgggcttcgggcttcctgcagccattggcgcccaagtcgcacggcctgacgcaatggtcattgatattgatggggatgcatcgctgagcatgtcgatgcaggagatggccgtggccgcggagtttgggattaacatcaaaatcttggtactcaacaataatgagcaagctatggtcacacagtggcaggctcttgattatgacaagcgatactcccacgcacatcaacgaaatccagactttgtgaaggtggctgatggaatgggcatcaaagctcagcgattggatgctgtgtctgacatcacagataaacttgagtggcttattcgctcggaggggccagccttgctggaggtgaaggtggaggaaaaggtccccgtgcttccatgggttactcccggcaaggcattggatgagatgatcatcaatgccagccagattgacactagtaggaaataggttgaagatcattttgcgatagttcttgctgcgcgatttcttttcaaagcaatgaatagcataattttatttgatgtcgtatatcggagacatttaggctgatctttgccttattcatcggactatgtaaagcagatttgctgcacagacgagccgagccgaacggcacgaagtaaaatactacgtcggagatttggccggaagggagctaagaccgagatagaatctagaatcatcgacggagcacactcggctcacatacgaagcctttgtatggggccggaattggcaatgaaatgcagctcagattagtctcgcgcatatgtaaaatacgttgcgcaacattttaatatgccgttggagtagaaacctgcatatttaaaggcaagtatggtgtggacgaattagtacgacatctactattccatatatccttgtctaaaacagccttcattggtccagtaccagaggccttgccgtcgcagggaggtaatattagctcgatataatggttggtctcccacaaaacttgcatcctcaaaatcattggtagctggtatgggggtatgtataaggatgtgaaatacttcagcagtcggacctcggaccacaaaagtctccgaccacacccacgttttttttttgcgaataattacattttggaaccgtattttttcctacgctgatcccctctgactcatagccaggtgagacctctggcaaggtttcaatggttggtaacggccagaccgtagcgtcgcttgggtccactcccaccaccaaggccagggcaaaccacaccctctcgctaagtggtgcagctgtcgtcccgtctgccgtttagtgtacaacggccacggcccagagacctcggagcgtctcacctatctccggggtcaggttttcggtcaggtccagctaggtcttttaagattgcttagtacttagctaaatccacatttcagtatactatcgactaagaacctctttgctcaagataagaactaaattcggatcggctgcccctctagtctatctgaaaatgattgtgctttggttattcaaataattcaaaacgatcccctcatcctctataaagaaattcgcgaataaagtggccctccgccccaattccgtattgttgatatgccctaccttgctttccggagtacagttcgtcagcgaacacgcgccagtagtcataacccaaattttcatcgaatggtttgaataggtttggcaattccattaagtcgacgcttttctgaggtacacagtaaaccaggtacgttgagattttgtcgacacaatcatgatcttattgattgattctgttgactaaaggctcatctcgagaaagctcagatgctagtcgtttgacgcgtatcatttttgtgttaatcgagatgtagccaccaaaaatcaaaaggtgccactctccagtgctgcgaagaaccctttgtagagaccaaggtctggaatcacattgaaacaagacgtgagaattgggcagtctggtaccaacagccaatttttccagctagctcaatcttgctataggggtagttcaatttgacgtacttccctttcagatgttctcatttcaacagtcactcgaacaggatactctcacccctcgcatatagtcaaatcgactggatgtgagttccactttcgatactgtccgcatgcccacgctgagttctgcatggcaattttatcaatgatcattgcctttattcccgtttgtgccatccatgtaccggccatgagcctaaggtggatagtcagtggggttttgtttcatgaacgacgaacatatcctgcaggaccagcgccgacaatgagaacatcggtgctcagtgagttatgtgtcatattgagattggacttgaaattcaccaagtcaggttgacttgggtactgcaatcgtgttccaagtaactaggggtttccaaggttccatgataggatgccgaagtggccatgtgatccatggatagttagttaactataaaagcactcccggggcataaatagcaacgcagacacctttccacgtttcgtctcagtagtcaccccatggtgttatcctgtctagcatcctactactcctagtgaaaactctgctctcacacccgtttcgcaggcagggctcccgtggcagggtcccctcttcaatatgttgtattattctacgtacagcagccgggttatagtagctacataggtcacgtaggcggtacgcccacctgagggtaacaggaatatggcagttatgatacaatgtaccgatttcttaaagctattagaaaaagttccgtctttagaaagggctatttttcgttcaatgtggaattaaaggctagatcaaaagcgatcaaagctgacacatcaagtgacacagcaagataaatttccttgccaacctataaattacaccaaaaccccttgtgagaggaaagggaggggggggcttagatcgaggctcagaagctgacggccgtatagctaatttggccgatttgccgctgaagaagtgggacccgcaatggccttctagatgttagcccttgacgtaccttatccgataatccatcctgaattgtggaaatatcttcgctaatctcgtcaataaaaaaatacagagccagagagaaacgccgagactggtacttcggcccgagccctagtgatgcgaccatacactgaatgacacgtgttagtttagttattcgacatatgcatgttaccctcgcgtgggtgcactatgggtgcacgtcactatagagtagctactttaccccgctgctgtccatagaataatccatatctatctttccctgagctaccagtgtgccaatgcacgtcacgagtcgcctacacaaaggccacacaatcgagaacacgtcgcgaacttccctgcacttgcatacatgaatcgcatcattgtttcttcccctcaccatgagacctatcttattggcttcgaggctaaagtacgcaaagcgaacgcctttgggtgatactcacgaatatataagccctgtcttctctgacacaaattggaggccgatcggtttttggaaccttccaggcaccctcaagccagtatctcaaagccatcttttattatgtcttcgatcgattcctcacctttggtcaatagtggcagcctaagaggttttgtcaaatatatgggtatactggcgtcaagctctgaagctcagtttgcatccgccgtgcttggcgagatcacccaacagcgtgagcggaaccattttcaagaagaagagctgaaaaaacttcgaaaggaaattctcgagatcaacgaaacaaaaagaaccacgatcgcggatatgtttattgccaacgagaacgaaaaggcaaaacagagagactccgcgacgcaaatcgagtctcttcgcgctactatcgacgcaaaggaaaagaatattgccgcgttttctaaggatctcggggcctctaagcagaaaatagcaaagttggaattgaatctctcgcaggagctcactaaaggcacaaaatctgccgacgaaatcaatgtactgcgagaaagtttgaaagagaaggataggacgatagaccaaatgaggactgctggatcgaaattgaaatcaatgctatcagcggaagagaaaaagaccaaagacctggaaggtgctaatacctcgatggatacagagctgcaggcagtgaaggctcatacccagaggctggaagagtttcctatccagccttcggctattcttgaggatttcgtgtaagtcgtgcgatgaatgacacaactatttgtattaaccgttcctgtatcattgacagagtcacgaaatttacaagcctgtggacttctgctaaaagcgggttattcccattgctagagcaggatgttccagaagatactttgaaggttcgtcctcggccatcttttctcacgctcgttactgataggatcaaaaggagaagtctatctgggagaaacttaggaaggcggacaggatactcctaccaccaagctttcctcttataccttcaaattctttggctgctaaagctgtacgatctgcgttgatcctggctgttctattcagagagatcgatcgacgtatattcaaaccgagctattttctctcagggagaaacagtcttcatgaggctctcagtcatctagcagagaataatggcgagaaagaagctttttgccgtcgcatacttctctctattgacccgcacgctgaatacgtggccctgaaagctgagattcaagccgtggtccagacaatgtcttcgtttgtggaaggcctattccctgaagcgcaacacgaattgtttcgtacaaaaaccaaatccatagttcaggacgcggccgaattttggcttccaattcagcgatcgcaacagaaattcgagatagatttcgaaccgtctgatctcgacgacaatgaatgggatcgctttcctctcgctggtgaaaatacaaaaccggtggcacaagacattcatggcttttatcttctcaatgtcttcccgtgtatctccttggtagaagacggcgaccatgatccattgaccaaggtcattcaactccgtgattcccaggaattatacttggcagcgcagaatgaagctactcaagtagcaacctctgctattaccaggaggccccgccccaggaggcaatcaactgcaggctcaaataggaggccttttttaggtgggaattcaaccaaaggctgactgataatctgtggagaagggtttggaaatgctgattgctctggagactgaaggagagtataatggagatgagatgaccatctgaggactatcaacaatagtactctatatgaacatttttgggtcatactcttcttatagtttatatttccctgtatgaaataatgtcttaagcctccagccatatctttgcataatgacctcgcacttgccaatcgaatcgttccttcctgaaccgtaagcgaggtcggggcttgcatggtttgtggcgagggagagcacaaaacccagtcgaggagatcgtagattgttttctttttcttttccttctctgtacttagaattcagaattgactatactcttttcttctggaaagaactggcatgtaacacctggaatgaagattcgatcgcaccagctggtgagatttccattagtctacgcagaagcgttcagggttcgaatcggcttttaggaagtattttgatgcataaactttttaattagcaccgctcgttataccatatatacaggaatgaatggtatttttattaaataaagctttcagcaccataaaaattcatgcatttcaatttgtggaggtggttggcaagctctctctttagccctgtatgaactatgggtactttatacttctgatgactagtatttaactataagtatcctgggcacttccctacttgcttctttccttccttcctacttccatcttttctcttccacccatcaccatcatcaccatcatctcctttcttccatcactttcattgtcgcttcacattatggcatcaggacttcctacacacgagctacttctcatctcgccaaaaacgagtccgatagattcctcgcctcgtaaacggaggacgaccccgtctcccgagtccatcctgcccaaaaacgttgtgttgttctctccccaaaattcccatctacagcccctggtagctccgcccgggtatgattttcaagtcattgttaagtgataccgactatttcagacatgcaaagctaatttcatatagatttcaaacctcccccatcctcttcaaccaatcttcaccggcatccctcactacatagtcatcccgatcctgcagcagaaccgtgtttaccttcctcgcgtgaaatcatttttcgtttcgacctgcgccaatcttcgtggatgttttccgaatctcatatcctcaagcttctgatagatctttttccaactacacaggcggttgagtttgatgacaggattctgatctttcgcgtcgaagtactgccaccgaagccctggccaaagcgaattgcaggtgttccgtgttatctgacggacaatccgaacgataagggcccagccattcccttccgctatcgaactcgttcgaatatccaaatctcacaggaccttgatcttcgaaataagaatgactcactgaacctcatatccgatctagtacgccagttctttgaacaagctcgaatcccaatcactgagattcaggtgtggggccatatcgtcgtcattgttctcgaagatcgaattgaccacgatgaaaatgctatggataaaatcttgcggtctgttccccgttctgttgcccgttgcaccttcttgtacctttcagagcatcacatggatcgcccccgcacgctgcctgctcaacgacttcaaaccgcctctccatcgcgatctgacggctcccagtacgatatactgagaccaggggtgatggtcagctccggtataaatctcaaaggagagtcaatgcgttcgtcctccggtgtcctagtcaaaaataatctgggccagaaattcatgactgttgctgcgcacgggttccctgccgatgcaaccgtttaccatcctcatgccggtggcagaacaatcggcagacttattatggaactcacgcatacggacgttgccttagttaatctcgaagatggggtggagtttgtaaatgaaccatttgagaacaccctaacgccagcaacttcattccgactccgagatttcattcggattgcagagactcagcagcatgatctggtatattttgatagtcccttctccggtcttgctgaaggcgagcgaatgtctagaaacaccatgcgggttccatccgacgacccccaagagccccagcagatatgggttacgacacaatggagctacatgggacaagattcggctgctgatatggttgacagtgtttgtagttctgccatttggaacgatgaccatagagttctcggctttttccgttatgccccggttgaaggtttatacaaagattattgcctgagtgttgctgcagatcatctgatcgacggaggatacagtgtggtctagccccgtcctttctttcagttatttgctttctctattcgaaaagtgatcgatggagcctgggatattcttactgtttgctgcggaatttgcttagtggaggcttgcatttttttaattttccagttcataatttgcccttagggaaggaatacaacttacccgcagagatctacccttgctcggtaccccgttgagaacggaagggtttggaactcatcactttgtctctcacttatctcctacttatcaatcacctcatcttcactgttgtgatcctgctcctctaaattggtgaccgaaaccccaacgaagctcgaagaagtttataacactatattctttgcgaggtggtggtcacctgaccactctgacaggtggcggaaggcaccaagcccctcggactagatcgtggtcgtttcgcctagtagaaatacaactctctccctctttcttccgcgccacacatagtagcccctcaacatatatcaataagccttgatacccttccctaaatgtcggtgcccttgctgtccccgttgcaggtcccctgttcactagaaaaaaaacgatctttctgccgcgattctactcaccttacataactatttcctaatacgaagaaaatcgtatttcaaagccctaaagccgtggccggtaactattgccagactctaaccatatttcataacgggcccgaatgataagggtctcatgactagcttacagccgctgtcgcttcctcgtagatcgatcttccaagaaagtccactcctcagacggcaacatgtgcttcgcctggcggcttatatttcggtccagcaagcacgacaatctgtctccttccaataccccatatatttcaatacgcacagtcttgcaaattccatcatctatcttagcataaaaaagtaggaaattttgagctgtggggtaacactctaacatccctctgtattcaatgaggattgcgatacggggcggcgtcgtaggtattatgtcttggttggtagtatctatcaatctgttcacttagctacaaacattgacagtgacttagggtagaaatatacccttatagagaaagaaaggccatgatgtctaggtatattcgtctggcggttcctccgggagaaagatatcaagttatagaaccacaaggtgaaggataagagtactgtttactccgtactgccctattaacgcattgtctccaactcattgtccctcaccaactcgttatcccccgataacgaacccctaaccgttgtagagaacgagagtcaaaattctgttattttggtaagatcttgttttcctttgaagttcgacatggtagtatctaattcttatctgagatttgaaggcgtagcttatcccatttacttgtgtatatgtttgagggagggcttgttgactacggtatcacgatggtgatacatactacaaaatcaatcagaactagagttccgaggttgaaaaagcaacagagtcgacagccgtcatgagagttttccagttttgttgtttatgttgtagggtttctcgttgggcagccatgcctacggagaaaggatcatccgttcctgccaatttctcaacctctgtaagtcatgtgatctcattgcgcaattaaacaccgaataactacacatagtgtcagaaatggcattgatcattccaagaagatgatatgggaggacaggtctcggtgacgggaagcctatacatggtagaagccaccctggagatagtcaagaatgagcctttctagaatcagcttgtgccctgtcatcgaggactcccgaatgatagatggattagcgctaggtcattggcaagctctctctctctcaatttgattatcaaggcacaaaataaggcatctaggcatcaacaccttcctaaagagggtttcgaatcatgaacgctatgtctacgtatcccggggagggtcacagagaattagggcccactactccgtactctgtaaagaaaccgaccaaagaaccaaacatctgagtcaaaaagtcggtctagacttttggaaatgagtcattgccaaaagcacaactctcagtactctgtacatcaagaactggttatgaaaacgagatgaagtcgaggtcgccatgtaaaggatactggcacctcccgtcttagaccaattattaaggacattgaaaccaacgtggcaccaaaagtgtcaacctaaaaggctctctagcataaggtgccaaggttgacatgccaataaccccacctctgtgtttcgcctgcatccacatttcggcattctcggagatcctggctctatcaggtcggtctccgagattggcgaccctagaccttcttttcgggatggaaatcagtcaactatcatgattccatagcaacacgagaggcttccgtagactcggaagctgtgtatctaggaacaagcgagattaggagccttttgatataactttgtatgtagacgtaatatacaagttgtacatcgtaaccttggaaaccataaaaccttctaagaggtggaccgagcttttaagatgtggagaagagattggcggcgcactgtgattggatcagactggctgactcagcttggatcgaacgaacgttatggcattatctcggattatcgaccggcccggtatttgtgcggaaaagaaccgggtattcggtaaagtcgatgatcggctctgttatatattatttcctcctcaacagattcattgacctctttccctctttgccttgaaatcgaatttcctaatccctgaatattcaagatgattacgtcatacttattgcccgcagacagcttggtgcttgttacaggtgccaatggtttcatagcatctcatactatcgaccagttgcttgcgaaaggtttcagagtgcggggcacagttcgcgctcccaagccttggctcaatgcctttttcgatgagcgatatggcaaaggacgcttcgaaaccctggttatgaccaacctcggtgatgcccaagaattggataaggcaatgaagggagtttcaggtgtcatccacatggtcagttctatacaaaaccatttaagaaggcaataacttcaaatttctaatcattttcaataggcatctgatctgactttcagctccgaccctaatgccgtcattccttgggtgaaggattctgtgctcaaggttcttgaagctgcatctcggactgagaccatccaaagggtggttctcacttcgtcgtcacgagctgcctttacctccttgcccggtaccaccaagggtcttactgtagaggatagtaagtatttcgcgcattcaagtctcacgcattgcaggaggcgcaaactaacatcctttagatacattcaacgacgattcagtcaaggcagcatgggatccagatacccccgcggatatcaagccctttgctgtgtattctgcgtccaagacagaatctgagaaggccgcatgggaatggatgaaagacaacaagccccacttcgacttcaacactgtgcttcccgacttcaatgtgagaattttcaattctaaagaaagccacgaactttactgaccaaatgtcttttcatgctttagaccggaaaggtccttcacccagagattggtggctcgaccatgggctatgtgcgcaagcttctcaagggagatagcagccccttcgagactttccctccccgtaagatcccattttctctcccagtcttttggaacattctctaatacttggtccctacagagtggtatgtcgatgttgaggacactgctcgtctccatgtcatcgcactactcagccacgaagtgaagtccgaacggctctttgctttcgcagaatctaagaactggacagaccatgttgaagctcttagcaaactgcgccccgacaacaaattgatccccaagcctcccgtgaacgaagctcgtgacgaagcaaatgtcgttccagccaaaagagccgagtctctactccaatcattctacggccggccaggttggactccattccacgagagtctcgcagctggcatcgaagggcttgaatagaagtgcgatgaagagctttatatgtgttcgaaatgagggcaccagccagtatatactagtacatattcatcctgaatgctgcatgacctctgcatgggaaatagcccacaacaatacatatgtaccggataatgcctggcactcgagacctttccctttccgttttagcgctcacctcttgccgctttttgatcaccgagtaaaaccgagcacgtctctgagacacggcacgtgtacactagggcatgtagtgatagttcagtgatagtcgccctctcggcttaggtttttgacgcgacgcgctgatcacgatctgtccacgtgggtccccggattttcgtgctccatttttgagactacataaatcgtggatgattcacgacctacttgaactgggggtggaaaattatgattaattactccgtgaaaagttttcgacgcattgaaaatgaaatctagcatctatgtcgcgtactagactcggccacttctcattacagaccgtagacaatagcaagcacaggcccaacaatcgccaacgcaggtatttcacagccagcagctaagccagtcgaagtcgcactcgctcctgtctctgtagcagcgctttgagaacttccagagctatctgacccggtcgtagttgtagctgtagctgtcacaacattatccgttgacgacaccgtaattgcacgcgcgatagtacccagagtccaagtaaaagtagccccactaacaggagacgagacaacaccaccggtattgtacaacttctccgtcccatttttaggaagattgtccggcgtgtagaaagtatccgtaccgcccgcaacctcatctccaaaaccaagtttcttacaagggaatttttccatgtaagtactacatgcttccccatcttctccatccttcaactgtccaagccagtagtctgctcccagaacagccggatctgtattagggcattcgtcccagatggtggatacaatcgcgctgtaggaacagcaaatgcaggcccggccatagtcggacaattcgtcggctgtaagctgctccaatgccttctcgtcattcccgcacgtcgtcaagtggttgtttatctgggtggctttgaggtcgattttcgcgaaattgcaggaacagccgcccgtcgcgtttccgggaaagggccagaaggggatttgttcaaggtcgactttcgggcagaagttgactaagttttcgccggttttttgatattcgcaggaatagacctagctggagtgtcaatttatggcagggtattctagtttgtaagaattacctggttccagcagctctcagccatgcaatcgatctcattggcattcttgatgcattcgcaaacattgatacagtcaatacctaggtttgggcattgagaagccatgcatgaactatcgccattgcatgctttgtagcatgcagggtctccgccagcgcagttgttattgatgcagctggcgtacctggtatccgcgtcttcgtagcatgtctttagaccctttggatcagcgcagaccgacgaatcgtcaaaatacccgactttctcggctagcacaattctggaggccgccaaagacagcaaaagaaacaatttaaatgccattttttaagcgcacacgagatacaaacacaaaggatgtgaatagggtatttatctaaaaattcatgacctgtaaagccgcaaggtccaaaaggctaaagggtcccaggatccaaagcgtggctagtgcttacgcccaacacctgaccaatggggctctaaaaagacttggcactcagcgatctcagtttgtttatagctagtccgagacgctgcttcgtttgattttgcccgaactggcttaatttgacgctttgccaagatcaagagccaattccggtgccggctctcctgtgtccatttgcaggggtacacgcttggaagcacgttggttccggggcggaaaagccacgtcttggcacgggatttgaactaactgatttttctacagcctcgggaaagttgttgcttttaaatggctcgcaatgtggcttcaacattggtggctttaaggcttgtatgagactgatagcgattttagggttcggaatagttcccgtgtctgctctttgggaaacaatttaaaccgcagtttgatcgaaacaagtgttccattcaggaaaaggaaaagggaaaggcttcgggagaccatctacccaaggcttggatgtggtcatcccttaagcctgtgtcgtgggtgtattgtgctggcccctccccaaaactgtgacacttttatccccgtagtatcttcccggcgcggttaagcttagagatgaccgcagttgaaaggcgggtgacgtgaagggaccggaagagagtgtaaatcagggagcagtcgtagactttgagtcatggaggaatagtttagaaaggccttcgacgggacaggctgcatcttttgtcgctgcaaggacaatattgataccttcgtggtttcggtcggtcttacttacttttaaagtaggggaagacatggtccatagtaggggtaaacctgatatcggccggggttaacttggtagcagcgaatacttcagtgtttctaagttcggcagctaagtatgtaaattttccgactcggaggaaccccgcgaaggcaaccctggcagcggcggcaagattagggtcatttttctgggctgctgagagccttagcaattgggtagggaggtgtgagatattccctgaaagaattatgactgaggccggtgagattgggttgggaactgcgcagagcaatatcctcttctggttccctgtgcaaggccattccagaccagctttgcatggccagcactcacgaaaatgggctgtcgggagaaataggtaggcggtggcgcctttcctatctggtcttgcccccgattttatgacgatcaaagagaaaggccacacggggctatttattttgtgttgagtttgtgttgagtcgtcctggtattgagtgcgttgacgatagttggctacgctcgttttctggaggatcccgtaccatcaaaaaatgcgtcgtgtctatcaaaacgcaaataaaatagagaagcgcatcatattagaatggtctagttttgaaaagaaaatatcgagccgctcgcgcacgttgcgctggctaattaaatgacatacttcgaaactgttagcacatctccactacccggaatagcactatgaacttactgggatgaacaggtaggggacttctttctcgtagcgcttccaggcctcgccgtactttcttcggcatctgttgatatccctgttggtgcgatggatgatcataaccatgaagaaaatgaagtagaaccaagggaacgggctcctatcaatagtagttagttaccacaacatcacggctttgcacataagaagtcttacttgaaaccggtgatcagaccccaggacatagagaaaaacatgtcaggaacatagtttggctttcggataattgcaaaccagccatcgaccatgatatggtcgcccgcatccgtttggatggttttgggattctcgatagcctgccacggcacttgagggaatgtgttccgttgtatgagctggcccttttccttgtggcggaatgcattcttctgaccattggcactgtcccacatccagtagaagaaaatgtacagagcagagaacactgcgagagcgtaaggattccagtggtattcggatgggtggtggttggccaagtagagagcacagtggcaatatgtgaagggcacaccggccatattccaaaaggtgagcaaaaagcctagcttttcaaaatacatgtccctggtatagtgtcagctcaattgtaactattgctccaacattttattaactcaccagctggtaataatcatctgctcagctttggcacacgcattggtatacaagtaatgtgccaccaccaagaagattacctcgggcgaaacatagccgtaagtttcgtactggcgagcagccacggagcaggtgatgaggaagagaatgaaccacgggatccggacttcgtaaaacatcttgaagtccaggattccaatgcggggattcagctcggcgcccataaagaaatcgtagattggagagcccgatagtctgtgggttcggccgcgcacgatagcttggatgtagactatgaagctgttcaagaagccagagaggatagcgacactcatgataggtccaaactcgtcaatcagcgtgtacaaagggaatacacgagtaacgtgtaggacaacagcgatggcgagcgtcgcatagaagctgcaataagcggagcagtagtaggggagcctcttgccgccttcgtgcctcaatggccggccgaaattcgaaacaccgggcatgtagcaatacatgagtgcctcgaggacaaagaatgtccagtatatcgcccaggctttcgcgcttggataagctccctcgtagaccagctgacataggtgacggccaaaatcagcccaggtctggttgggcttaggcataggaagcatgccatcatagtacgtggcaccgatccacatgtaccacatcaacaaaggaaatcccgtcatcaacagcgcagcaccgaatgaaccaccgaattcgaattcatctgacgcaccgtcagtaaacttggtcggggtagttgatccatcctccttgctcctattagctggaatagaagcaaccggttgggttctctgtcttatggtcattgccattgatcgacgtgggtgagggaagttgtcaggatgtcgaaagagaactggcccctgatatttttgctgggattagatatttaagggcatcaggtgaccacgcgtgcactcgtgtattctttggtggcttgggggccaaaacatcatttccacacaaaacgagtacctactcaataaaaccatcatttcaacctatacccctatagtagctataataaatttatgctacataggtccctgagatcccgctctatccttcgactatcaatttcctcgtttttctctacgcgtgctgagagatcggcccgagtagtggcggttgtattatacgattttcgcgcctaccgaattactcggcgcatcccgagcaaagtggggctgggaaaacgatttcaatacgataaaaattaattttctgcgtggcagaaaatagtcagctcgccattagtccgcagctgtaatgagtagacaacaatttacccctacgtttcctctaattactaacttttctacggtcgcattgagctcagatcgtaaaagtatgattaaaataccttttttaacaattgtatacgttttgacctaaatgcgactagtagaagccgatcagcaagcacggagcaagcaaataaccaagtaaggaagtaagtaaaccgggcgtcggggccgtcccgaggtcttccaaggtttccatccacccgtagaggtaaatgtgggtggagaagaagaggctctaatattacataccgggccgagaccataattacacaggcggtgactaaagcggtgatccaaaaatagccatccctgactttagcgcccttttgggtaatccctcttagcattcggagtcaagagatgacagacttcttcctatgttgtagttaaaccttgtcaactcccttttagtcctatcaccctggcacccctatggccataggatagcatttcctatttcggctgcccatgtgcacaaagctgttgaataaccagagaaatagtggacttttgttgccttcacttatgacatggtctattaagttaactaataaattattttaagtgaaataatatctagtccatattcctgcttcacacctcacccctgtgttctgtccatctcatactaccaattggaacaaccggccccatccctggaccgccgtcggatcaacctcacacagtagcaacatgtcccaaatgactgtgctcaccgtatccaaaaccaccacaccatgcgtcttttcccagtagttcacccgctgagcagctcggagattggtgcaaaaggtggaaatcacctgcacctggcggctcgcgacgtcggctaccatctcgtcgagggtaggctcatcaacgtcggcaaatgaagtgttcctcgacaatccaagatggcgttccttgctgcaatccacgccaattgtcttgtatgtctttataatggcctcctgtacgttgtccatgtacggtgtcacaagccccagttctgtagccgagagcaccttgagagctttgttcaaggccaatacggatgtcgtggccggtatccccgtcgccgcggtaatgagtgtgcacagctcttcatcggcggggaagcctagccacccagatgacgtgccactccagccaatgatgtcgacgttggcgtccgccagcagccttgccgctgccaaaatagcttcgttttggaattgctggagggcatcctgctcgaggctgatcttcaaaacggtaaaccgagaaaagtgaaccgagacattgggaatttgagcgatgactgcttgcgacaagggctcgaggctggtattggaggaaggtgtgagaattccgaggcggatacgcttagccattgtagagtgatgatttatgaatgcaatatttaacagctgaagaattggagctcaagaagaagaaatagaactaggattgtaatcaaatcatgaaagatttcagcttctccccgcattcccccacgcgggatacaatcaggaaatctatatcgcccgatctttcaatctttccaccaattttcggcctttgaccgagatattattcccccacattctgattggtctccccaagttactatcagtatctagactccaaatcagtcagaatgaccccaatcgttctttcaggaagtatgttgatgattggggttagagatggcttaataagaatcacactgtcctcttatttcgtgggagtcatcgtcagttgaactaaacaacccaaaatgtcgacaataaggcagcgatttacaggtgccaagcgggccttctccagccggcgtgcgctattggaagcagttcgtacagaaaacgacggggaggctggcctcttcggcagctggtcaaataaagatttggacccgtctcctccttctcagagaatatggacacgttggtctttctttgcttttcagtttagcatcgctttttcgccgaccacgtacaatgtcggggctagcctctacgctgtcggtctcaactggtggaccatcttgatagcttcctgtgagactatattacatacctggtggccgacggtgctaacatataaacagttatcgtttctttcttagtgggtggaatgctttggttgaactcccgtggagctgcgatgtatgtaacttcacatctaagtctagcattccatgtctaacgatggtttctccagataccacgtgggatatccgacttacgtgcgggcttccgccggtatctatggatccctaatattcatcttcctccgaggggtatgttgcagcaccagcaagacttgagagcacatctaattccactccgcaggcggtcgccattttatacatgggaatccagactctatacgctagttattttgtgaacgttatgcttcgttgtgtctttggtcacaagtggactgacctcccgaatcgtatgcatacctgtcttgttgtccgttccagagctaactatgtcttcagatcttcccaagtcagccggtatcacatcgggaaagttggtttccttccttattctatggcttctccagttcccgttcgcatttgtccacccgagcaaaatgtcaaaagtgttcatggtgaagtcggttattgcaccaattggaatgattgtgacaatgatatgggcaatcgtaagcatactcttggtcttatttgagggcgttatggcttacaatctgttagatctctagccatggtgtcgatttccacggactcggacctagcaatgtgtctggggccgtcctgggctggtctttcatgaaagcaatcaacagtattgtttctaatgtgattcctccgttggttaattctcctgatctgacgagatatgcgaagtgtccacgcgacactctgcccttgtctattggaatcatcttgagcaaaccagttgtggtgttcctgggaatggtcatcacagccgctggttacaaacagtttggagaggtaatctatacatccagtgcttgctcattaatccgatactgacttggaaataggcatattggaatatgtgggatctctattctagtatcctagaccattactggagtccaggagcccgaacggttgtgttccttggtgcgggtattcaggtcagcaacctatttagcaagatataattgcccctactaataactttgacaggcatttgctacctttgctacaaacctcactagtaactcaattccagtcggatgcgatctcgctggtctgttcccacggtacatgacaatcatccgtggccaagtgtgctgcttcttattggcgtgggtagtgggtaagaaatcaaactattatcatagaaattcaccagtctcaagctaatcacactgcacagttccatggaaaatgacctattccgccgcgtccttcctgaccttcctcaactcatacctctgtttcatgtgccccattgtagccatgatgatgtacgttcccaaatttgccccggaatattcaaccactaacgaaccctctatcagtgttgattactggatggttcgcaagggaaacatccatgtgccttccctctataacgcaaaacccggctctccatacttttatactggtggcttcaacctacgcgcatttgcagcctggatcggggcaatcgtccttgtcattcccggtgtctctggcgctcttcaccctggatcgatcggagacgctgctgtcaagatttacaacatgggcttcttgatttctaccactttcgcggcgctgttctactatatatgctgcaggatttggccagtgcaaatctatcctaccgagctgggggcaaaagacgctagttgggaggccacgaggtacacagagggctttttccctgaagacgaaatcgtgccggactatttgcaggaaactgtgattgagggggtgacagtggggccttcaaaaggctcgttggaggtagaatccgtcaacatgcggaaggagggaatgttgtaatggctgaacagtgattttatgtgtttgatggattttatgtagcttttggatttgaaccagtacgtagtaataagaattgttaatcatatttccttgttaattgggttctgataattttgacttctccccatctccattgctcgtaaattttctcttacatttctaccgtagcccctcagcctgtcctgataatgcctcgaggctgtcaaggcaattaccatctaaatgtccatatgaggcaatcggacctttccgcaaagataaggccgtgttccttggcaaacgatcgggcgatcgggcgactgatcggggagttgataatattgttgataatcggatttcggaccgagagagtatttagcaccaatgagactaaaagctaagttttttatcaaagcctcaaagcaaattcgcaacaatgaatttaccctcaatggctagcaaattcgatctggtggtgctcaacgggaaggtagtcactgccagtgacatttggtatgttgttctcccctctagactgtctataacgtactaacaaagcgaagcgactattgcattgggattaaagatgggaagatccaaaccctcgccgagagcttctcggaagatgagatagcaggcgccgaggtcatcgatgctgagttcgttccaagtaggcctcatgacgtggatgtggaactctaaccattgcatctatagaggggcatatgtgatgcctggtggaattgacgctcacgtccacttatgtcaagatttaaaaactggtgagttggtacctcgtttacaatagacttttcctaacattaccaggaccacacggtctaggaggtgaatgcgccgataacttcgagacgggctcccggagtgcagtggccggtggcacaacgacaattatcactttcgcgacacagaccagaggagaagaagaccgaagcctgatcaaggtcgtagagtcttataacgcgcgtgccgaggagacgggcagctacgtggactatgggttccatatcattattgttcgcaatgatgccgacgtgctggagaccgaactcccgattttgaagaaggactggggcattagcagctgcaagctcttcctgacgtatgaaacacaacggttgacagattcgcaacttttggatgtcatgtgggctgctagaaaaaactccatcactacggtaagtatatttctgaagagaaacgaacgacgctgattttgtagatgattcatgcagagaatggggacatgattgcatggcttacacgtaagagtgattgagcacggtgaagaatcagaagctaatcggatgacagaaaaactcgaggagaaaggcatgaatggtatgtctatttacactccggtctgttgaaattttgcttacattttatagctccatactaccacgccttgtctcgcccacctcttgtcgagggcgaggcgactaatcgcgccattgccttagcgcaattgatccaaaatccgattcttttcgtgcatgtcggctctgcagtatgtctacctctctgtcatctcagactgaagctaactttttcagcttggggcggccaatgtacgtcgggctcaaaatatgggattacccgtgtacgctgaaacatgccctcaatatttccatttaacatggaatgacctggtaagtttcctacatcgatcgacaattggcaagtcctaagagaagctctagaaacggttccattcaccaacttgtttcgaaaacagcaaaatgatctgctcacctcccccacccccggatgcttctgaccaggaagatttgtttgtgtaagtctcgtgtgcaagtgtcataccagtaaattcctctaatttgcatagtggccttcacaatggaacattcacaatttactcatccgatcactgcccttttcgctacaatgacccccatggcaaggcttctggagtgcttgagcacgccaaaagcatggaaggggagtcaccgcatgcctgcgatgatctacatgacctcttgacacgcaaggaagggtcatttaaattgattcccaacggcattcctggtgttgaaactcgactcccattactctactctggggcactatcgactggccgcatatcaccacaacgctttgtggaacttacgtctacaaatccagcaaaactggtgaatactcttcaacttcgtctatcatcctatgacatcgctaactcaatatagtacgggttatatcccaaaaaggggacactgatgccaggatctgacgccgatttggtgattgtgagtttcaatttcctgctacaacctccgattcgagtttctaacattgcgaaatcagtggcaccctgagaagacgtttgagccattccatcttaccaacgcccaactccaccacaatgtcgattgtaaggaataaattcacaccatgtctacgcatttaactgactgcattacacagatacgccatacgaaggattcaagatgctcaattggcctcgttatacgattctccgaggcaaagtgatgtgggccaacggtaagatacttggtaaggtccgggatggccagtacgtgaagcgtggtccaagtcaactgagccaaggccttcctggagccgatcgagacccacgacgcgttgcagcttggctctatgaatgaaataagagtgtaatgatgcacatactttggcgtcttcatagacttatctagctgagacaaacacgatcaatatagacatggaaaatagagaatacaaaatgggattatgcctatcccactcatcgtggaaaacgggaacattggctctccttctatagtcccaacttcatccttattcctaggcacaaataaaaattacgtaaggtcgcaccttccgagattattccgaagataagaagcttatcgcccgaaagataaggtttcccgtatccatggatatcgcgcgaaagagaaaggcaaaattcccctatcacagcaccttccgggtatggtatggtaattcgggtatgtgcaggaagaactgtcaatcggaaaaggaaagcttggaagaatcatccaactatcttactatcaggtcagccttctaatagatccatggatacttccaagctcctgcggccattccagcagacgcggtcatatgtggctcacctcggctcgttaccatataagcttatcttcccaacttgcctagcctgcacaacaattgggtggtaaccgttagcccccgtcccccccacccgggcccgggccccctagtaaatnnnnnnnnnnnnnnnnnnnnnnnnnnnnnnnnnnnnnnnnnnnnnnnnnnnnnnnnnnnnnnnnnnnnnnnnnnnnnnnnnnnnnnnnnnnnnnnnnnnnnnnnnnnnnnnnnnnnnnnnnnnnnnnnnnnnnnnnnnnnnnnnnnnnnnnnnnnnnnnnnnntcggtcgccacgaccgaggccaggcccatgtagtagatagctctctcctcatttctctcctttgattttccctgtctgctccactacatactggagcagcacagttcttctctcatagagatcctcattgtgtagcagtttctaggacaaccaatctctcgtctcccttcgtgccgtcgatggcctgcccaaatggatcactctggtccaaccgggcgtgcatatagatcgaagatcaaacggccttgtgaccgatgtcgactcaggaagacagcctgcgtccttccagagggcccaccctgcaggagttgtttcactaataacaaagaatgcaccttcaaactgcgtcccagattgaagacccggcgtatgagtacagaaaatcaagctcctcacgctactgcgtcttacgaggtgccaaatccaacattgcaactcagtcctgatagtactcgattgcaccacgacccgttcgaccaggacaggggctactcctacaatgatccagtccaaatgtggccggggcaacatgctcaaaatgagcctcaacctgatctcatgacccgtcatacctcaatggaatctatggatgaccatcctatcagtccggatcaagagtcaccacagcaaatcggggccattaccagtcctgcatcgcagcccgttcagcgcatccggtcgctagatctcattgaaggatcgatcgcgcagttttacggcatgtcctcggagtcagatccgtggctgcttcgacattgccgatacgatgaatatggcatgcgcagcctgcatcggactcacatccgtaatgtcggtggcgtccccgttgaagggctggtaccggtccattttcttgagaccgagaaggagcttatgctgccaaaaggctcagatatggataatcggtctcagaaggacgtgatgcaagaccggaaccaactcaatgatatggtctccccggaacacggcaagcggcttctatccttatttcttcgattcgtgttcccagccgtcccaataatatccaggtcccagcttggtattacttcaggagtgtcgactgctgtgttggagaagatccccgttcatttgcttgcggcgatttatgcctcggccatccctttcgcagtccatgactcggtgctgtgtgtatctgccgcatatggggagctcttgtccgagaagctgtggcatacggtctacgagcttatcctccaggagactcacacaccaaagctggcagttttgcaagcatctttgctctatctgcaacaaattcccgccggaagcctgaaagccctccctgatgggccattcatttggtctttccttgggtctacagtggccctggctgtctccctcggtcttcatgttgaaccccggccatgggggattcccccgtgggagaagcgcctgcggaggagactgtggtgggcagtctacgtagaagacaaatggcggagtcttcttacgggccggccttcatttatccaccctgatgagtttgatatctttgaccttagtgccggtgatttcatccaagatgagaaagccgacgaacatgaccataattgccagcctcttttctactacactacaggtttggctcggatcatcgagaatctgcatcgcacattttagtaagagcaatccccacccctggttaattctgctattaattgaacagtactataaaagcctctcagagagtatcagatgactttcgcgcgtccatcgacgctgcacgacccatccgcgcccagcttcaacaatggtacttatctcttcccgatactcttcgactcaagcgtggctccgtttcaaatagccacatagcatctgacccaatcgagggtgcgtccgaccttcatttctcatacttggttcttgagatgttcctttaccgcgccattctccgtcctcttgcccaatcaccgccaccgccaccgatctcagacgacacagatccaaccccgatgggagctttctggctcgttgaagacctaacgttcgacactcacggcttcgatcaactcccagccatgaattccatgcagcttggcgaggctgaagaggctaccctcaaggctgcagaaaagtgtgcggccatcatcgtcaattttgtaggagccttggcgccccatgagtttggctccttctggcatccttgtaggttatccgttcatccgcttctaatgtaatgatggaattgtatactgactatctattttctagggaaccgaatctgtttcgccgcagtatccaacttcgtcactctgctccttgttcaagcgccgaccaggcaacatgcattgagatcgagggatttgcttgagctgtggtcacacacacttcgttgccagcactggagccacgaaggcctaatgaagctaggtctagtgcgactaaatcagatgcagatcgagggattggagaacatcttcaatttgcctgcgcatgtatccgagatattaagggatacacagcaagattaaatccctagtttcggatatatggtgtacaataatgataaaaacacaggcaagctagttcacattttcagagacgacaaaggatatgaaacgatttttgccgagagacgcaagattgcaaacttgagacggtctgattattctgatatattatgcctaatatgactccaattcaagctgtacgatactaaacagataactgtctttccatagcccaaagaacaaacccttgattgtaaccccaggtaaaaggaggataatattgttcccccacgacgcgaaacccccttttcagccaataagcaccctggatctcgcgaatagatctgagcgtaatgcacaagcgagacaattcaatatgccccacaagagccattctcctcttcagctcctcttcacaagccctgattaagcattccgcaatgcctttcctcctatatcgaggatccggcttgatcgcaacggctacaagctcgaacccgcccttccaatgcgcatcccggtgtttatcgccagaactatccagcaccgcagagctcgcggagaagatctcatccgcagtgaattgttcagaatagcccgggaacttccacacgtcttcgggatctggcgagctgatcttcaagctcgcagtaccgatgatggaattttgagcgaatgcaatcgccgtgaagccggtttcctggagctcgtcagcgagctgggtgtcgcttttgagtcgaagtccgctctttttgtaagaactggcgccggtatcgtagtagctggcgttgatgacgtcctggagctcttgcagaaagggctgcttgaggagatcgctttgtgtgaaggtttcaatactgtaggaaggtgagccttctacagtcgtagacattttgtggtagaaaaagacaccaagatgaaatgcggcaaagcgtatgatttttaagatagccgcaaaccccaattaccccaatagcagccagtctgtgcgcttctccacggtttcataataagcaaagctaaaagtacaaacaaactatgaaactctcctatagtccctctgtaaggtgcctgagaagaccatcagaaaggaaagagcgatggaaccaagacataccaatgttatcacagtctaaaaggcttgaagttagatgtacatcaaaacgaacgaaaaagtaaatatttcattaactattgcactataaatccttacccattggtatctccaaatactcaaccattctctccctcgcacgctcaacctgatcccgcacatccagatcccaaagccacttaaaacgccgatcaagggtatctctcagctttaccgggtcatcacgaaccccctcaaagcacaaacaaagaatatctgcattctccttgctgctagtaacaaccctctgactccgcggccgacgaatctcatcataagccttgaaagccgcaaccacgtcgacgacagagctgacacgggaatcactcagtagttcggcgaggacatgtgcatcttcgatagcctggccagcgccggcaccctggtgcggcgtagacgcgtgcgcggcgtcgccgaggatggcaattctggagcgggtgtaggttgagaggtgtggatgctcgaagatggcccattgggatgggtcgggcatatgctagaagaataagataagtaattcacttaaacgcaaataaagcatgaatcatacctcaacaagagccctcacataccgccccatatccctcgtatcccgctccatatcttctctcttcgccggcctcacccaagactcatattcccaatcctgcgaactcaacacataaataccaacattaaccaaacgagcccgcataataggataagaaatagcataagcgccgcgcgcgacatacatcgtcgcgaccctcgccctcctctccccaaccgcactcaccatatcccccatatccaggacagcgcggtatccatacataccactataaaccggtttcgcacgtagcgaatgttccaccggaaacatgcactccttaacccgcgagcgaatgccatcacaaccgataacaacatcagctttcacgacctcgccatcctcgaatcccagcacaacgccgtcatcaccttcaacgagcgtgctgagcctcttcccgaaatgcacgatctcggcggggacgagctcaacaagcgtgtttaggaaatctgctcttcggagcgctgtttggccagagggtagggctttcagatccattagtacgtcgccttcttgtgggcctgttgcccagacgagctcgaaccaggtctgtaggtaagaatcgtagccgggactgtctgcgtgggtggttatgagggagttgtagatttgttggatttgggggtggattagtggcattgcgcggtatgcggctgggccgagggagattcctaggcctatttctttgaaggttggggctgcttcgtagatttggacggggattttgcggaggtgcaggccggctgctagggttaggccgcctattccgccgccgattattgttattgtgggtttagacatggtgagttagagatagacggatgggggtgtgttggtgattggaggtgttagttatatagtttctaatagtttctgtgagttgtttaaatttgtcgggggttttcgtgagagtgtacttgtgtataatgtcgataaggttgagtgccatagtgtatgtactctatatcccacatgggcgtatggtgatataaaaccggactagtaccacaatgactgtatgtccgacgtcgcggagtcagatagaggggtgcaagctttcgaaaacgggaaattttcgaatggaagataggggattggacaggccagggaagtgggctatcagacatcccgcggtggcccttgatctgcactgttagcgcggtgcgtgtaatttgccgggaagtgcacggcatggacgaggggtctacatcgtaggacgtcaacgctgttacaaggattgtcttgaatggagaaatatgacattaaacctggaaggtaaaagatatcgccaatcgtcacgcgtcacgaatcgtgcgtttgcgtgtgcaactctaatctatcgtgtgtatcccattccatgagacgagagagcggacatgtgctcgacatgtagcgcagcgcggtgatcgaagtcgcgatcctgtcgcggggatgcccctaggggtctgaaatggcgcattggcatgtgcaaaaaaagacaatcctaaagtacattgtactcttcaggaagtctagatatatgagaaagaaaagaaatatccgctagaaaaaaaacgggaaagtcgcatatgttgcaacatgaagaaatcaaatcataggagcggtcactacccgctgacgctcccactttggaggaccgaatggatcatcacgggagtatatatccgaccgatcccaatcggagtcgctgtccgcaatacctgtgtgcttatcatccgaccgcaacgggggagaactgttagagtcatctagcgcgcgacggaagcgaaggaactgccgcgattccatattcgcaggctgcatcatgcccattcccatgcccgactgcatggactcgagtgctgcacgctgcaggtcgcggatgtcattgcgcagaccgccgacctgtgtttctaagtttctgcgggctgtttgttcgcggcgcaggagcgtgactagcgtgctatactgctcgattgagacgccgtggtagtcggacagggatgtggctgatgggacggggcgaagggtgcgcgtgttcattgtgtctgcgcggattgtgctcgtgctggaagggcgggcgggtatggtcgggagagggcttggggaatcgtcgcggtcgctggtggataggaatgcagttggtttgctgcgaggggggtaagattctgctgaaggcggatgtcgtgggcgggatagcttctcggtgggctcgggcccgttggtttgcattcgcgcaatggcgaattccaggtcgatgagtttcacttcgagcgtggtcaaccgttgttccagagtgacgccgtcatcttggtgcattgtgttaactagatttgcgacatttgatggaaggctgggttgttctgtaggctgctcgacttccaaagatggtgcggcggacattcgcgtcacactcgttactgttgtccccgacgaccgcctcctcgactgctcactattagaactttcatctaatggcggggactgcgaaacaaccgaggctggccgcgccggggcggatggtgtgggtttccaagagctcagagtctctgggaggttatttgtcatttcgcgcaatccatctgcgctccttgataagcggtgcgagagcaagctgtgtcttcgctctggcatgtaacccctatcctcttgcggatcagatactgccgacgcgacggcaaaccgagagtcatcatctgagaagaccacactgggaagcgttgcccgccttcggcgtggcatgctaccgggaactgaatcacgaagtgttgcagaggagagaggggacagcggagacaaatgattatctgcgatctggaggttttccgccgagagtggactgcggtgtgaattcaaattcaagggcggcggaacagccgacggtgatttccctttcggttgtccacctctccgcaccggtggcatgggcggcaccgcaaaagtagattcgtatgggtgctcctccagttcatcggcctggctttgtcttttgcgattgaagatcttgcgcatgaccgtcttcaaggtgctcccggttcggcggtgggcaatagagggctgtgagtgatgggagtggaattccattgacggcagcgccgtgtcgtcgtctgccttgtacgatgtagggttggcggagcagtctccccgggcgggaggggttcgctgtatactccgaatggactcgctgccagcgcttgctatggatcgggtggggtatctcgacatggtgtgtggagggtcgcaatggacaaataggcatagaaggtaagggtaaggacttggatcattacaagctgggtatatggcgcaaaagaaagaagaaaaaaagaaaaagagttcaagcgagtgtgagaatgaagggtataagggtatcaattcgaatcaaggctggattttagtcgagtgagactattgaaagctatcaaacgcatgttagctgaagaaccagggtgggacaaacggaacatacagtgttataatcaggaacataatgaacacccagatcttccagtttgctctgaacaaagagaaaagaatgactgaagaagaacaaaggggaagagaagttggagaagattagggagggaggaagagggaagacagctattatccccacaccgttctttctttatgccacgccagaattgatgtgttgaccacaaatacaaagtgatagttgactatttagtcagctacctaattgctcaatgcttcataaatggtttatgcaatactaaatactctactctatcccattctacctacttccctccctcccgtgaaagatatctgaaacacgccgtcctcaggtgacacgatgcagtttcaacttcaacttcacttcaacttcatttgtccacgtagggcctttgattcatgctatgcccctcagtaagaagaatctcattctccattaggaaatccatctccggcattcttatcttcgtgtcaagtcagtatttgagttctttaggttctttagggtgttctaccccctgtttctcccttgcataggccgtgcactaatttattttcgacagcgatcggcgttgttctggaactcccatctatagcaaatctccagcgtcgggataccgcagatcggcattttcttcgagaaacgccatccagtgcttaaggaaactacttccgctgtaaaaagatcagcattaaccctcaaactaatggcgcatcctgtacggagtacgtactgactgatcgtctccgagtctccgcaaatacacaaatgccgcttggggcgcgtcatggcgactatacacagcatggttaatatattttcgctgtaggtataacacctatacagtctgcaaaaaaaaagagaaaaaaaaaaaggaaaatcataccattcaatcgtcgtttctcacccaggaaacccacttcgtgctccgtattgctgcgcactagactcaccacaacggcttctttctcacggccctggaatccatccacactaccaagttcaagaccgggatatttttctcgtaacatccgcgacagtagagccaattgcccgttgtaaggggtgatcacagcaatgctttcgggcctgacacccgcatcaatcagattatcgacatgtctagcaacgaccatagcttccatctcgttgcttttgctgtctccaagcaaggctcctttctggctgatctcatcctcagccttttcggggaaatccccaccttgcgtgtcccagaatactaggggttcctgcgtgtcgtctgtaccctctacttcatagggtaggtcgattagtagacgggcttttaccgcgtcgctagctatcaatttgctctcgtagagttcatccgaggggaatcgcatgatcttctcatgcatgcgatattgcgtggtcaacatgcgtttgatccccggtccgtgcagggctaacaaacgatcaaataatgtgcgttggagggagacacctttcaatgtctcggtatcggtgttgtcggtctttacctcgctcttggaagttttatccttctgtccggtagatttaacggtcggtggtaattgcagatgatcaccagcaaggaccaccttctctgcacccagaagagaaatccaacattgtgcttcgagcgcttgactcgcctcgtcgataatcacaacatcgaacttctggttcttgagttggtgaccgccagccccgtgaagagtagccaacaccacgctactctcccgcaccagattatccacgcatttagactcgcgctgtcggaactccttccgcagcagcttcaaatcatcataaatacctcgccgttcgcgaccagaccgcgttttgcgaatactagcctgtttttcatcaatctctttgcggatatctttcacaatccccccggcatcagaggtctgcgtaagaacttcaagagaatgctcaagaacagaaggaagcagacgagccggatgcccgatgcgcacaacaggaaccttttttggagccagacgttccacaatattatcaaccgacacgttcgacggtccgcacacgagaacgcgcttcttccgctgaaccaattgcagaatcaattcaatgagcgtatgtgtctttcccgtcccgggcgggccatgaatcagagcaatatcccgcgaagccagcgcaaaccgaatagcatccttctgcgagtcattgagcgtgggatcaagaaactccacagttccacacgcctcagtatccagttgtagcggggtcgtatgcccaaacgcaacacgcatgaaatgcgagtaatcagactccgtcatcttctccatcttctccatagtctgcctcatcctatccaggagtcagcaaccaagcaatcccaaaccaatattccaagcaacatacctcctatacgtaacatcgttagcaagcttaatagcccacagcttcttcccccacagctcctcaacagcctcatcatcctccttagacgttgccccaccctgccgcccaaacgcaatccacacagcgcgatcaccagtccgcgtaacaacgccctcaactcccttctccgcatctttgttcttttccttatctttctccttccccaccttcttccccgctcccgcaacatcactaactcgcacaacatccccgacgcgaatcccatgcgacccaagacgaggcgtcccatccgctgcccgtgactcatctgatgcgattgctgggtctggagcgaactcgccgaccacgcggccgccgaggccggttcggcattgtgagaggatgaggcctgttagggcgtagccggttgcttggagggttcggcgggtggaaggggagactgttgcggctgtgctggcgagtttggaggaggagacttcggcggcgtgttcttcgaggaggaggttgagttgggttgaggcgaagagggggattgggattggggatggaggaggcattttgggcgacttgggttgtgtggaggttgtagatgggatctctggagagatactgcgtgctccagttgactggcacggtattttgttggtgtagattgaacttccactatggaggagttgttgagctttcgaggtgcggggataaagaagcttcagtcgcttatgtccgagctcgggatgattttattggctgtgggtttaggagcttcacatgtattctacagcaagagaacaaccacgaccaagagctaatgaacccacgttgttcgtatccaagacagcactactggggtgagaagctgccaaccgtgttaagtccgcattcgattcactaagtatgccaccttggactttcatgttgcctggcaaaatcttagtcatccacgacatgaatagaccgcctgatataccgccttcccagttaatatactgccaggaggtcccgaggttcataaggttgccccactccccaatttccccaactccacaacatacctctctacaatatacagttctttttgcgacttccaaaccacatcccctagcccaagctgatcatggcgctcccttcagaattagcagcgcatctgagccccaactgagtttccactcacagggaagagaaattgaggagacttggtagacgacgtttctatatttcatgacaccaatacctatcaggtttctaaaatcctatgtcaactaccttccaactatctatcacttccaatgtttacaaggcagtctaggggagcacgcaagaactgcatcattcaatctatcaatacacgtgaccaaaatgtcttattgtcctttacaggcactgctctggcctgtaagtttcatcgcctttttggttttgttcactttttttaacctcttcctaacgtatctttagaggagcgcccagtgatgcactattctaaggccgagcgcaataatagcgtaggccaacttgcgaggctggttcgtcgagtacagtcgcatacctgcaatacatattgccaaaggaaaaacaaaaggcatatcaaaagctgccgtgaaagaagaaaaccgggtggccgaattagttcgcctggcgggagaggagggccctcgcaccatcgtcctcatcaaattcatagtggcgggtggcactctcaaaaggaactttcgtggccagctgaagaccctccctgtctgtcggaaaaaagttctagtgctccctcaaagctcccaactttttctacagctgataagacactactacaatcagacgacgcaaaaatattcatgtactccattaacccagtcgctatggttactcgcttagtgctttcgtcagcctaccaatttgggtaggaattcattttcctactcttctgggccgcgcgacataagctttccagatatgttacttcgctatacgggattagctagaatagcgtgctggcccacgatctaattggtggcagcccggcggagatgtccagaatggtcacattgagttaggtgtgcgcggccatcggaagccagtacgtccatgcaagcgaaagaacaccaatagccgaagttgtctagcaaaaaccatcccttgcggaatattggtgtcttgacttgtgatgaacaagcacaacttgatatacgcgttggcacgagtgagttaccatacacgcttctctcaatcgactttttatttactaaattctatagcacttcagttcattttggggttcgatcttgctacgactatcttccgccttttattgttgagtcagatcggagcgaattctggaatgcattaatgaatgatgtgagcgcggagatagttgtgctgccgctttcattgagtggaatttcaccgtcgaacgcgaacgggagtcgtgagtggttctgtggaactatatatacggaatcgagatggcatgccggtgaaccgccaaagtatattaaagacctcgagtttcagtagtcaatttactaacggcgtttaggaaatctccctaatttacccggaatcacaaccggtcaaagattgaactgagtcgccaagaagcatttggcccttgccttttcccgacccaacagttccaaacctccaagcgatatggtgtaccttgtgatgatctaaggggaacgtacctgccactgcaaaaggagcacgtacaaaactggggaacagaacgcacaaatagttttcctttttctttcccctcttgtactcggtatttggaccaaatcgcactcattcatctgaattgatctggcacgtaatatctctgaagaaagacgatctacggatactagcgcttctaagtgcaaaaatgcctactttgctttcggtttcccacttcccaatggcatgacagttctgtgtgaccggactagtgccatattcgatatttgtttcattcacggtcgacaggcgatcgagagagttggaccgccgatgttcaatccacgccctggccgagggaactgcttccacggggctgcgattcatacttcatatccaaattagacgtctcgtcgaatgagctggtcgactacgctacaaatcttctagataatttgtcatcggaccgagaatcctgcaatgcatcttcccgcccgctcatttttggcacccatggctctgggaggctggtctgcaagaaggcgaccctacctactatcgcgagacaatccgtaaacacatatccagggtgtattccgtgctctcaagggtccgatatcgatgggtactcctcacaagggagcttggatggcggattgggccaagatttctgccactacgtttggtttcgtggagtctaccaatatgaagttgctaggtgtcggctatgcgccccgtatcatatgggctgatcataccgatcataggaacatggtcaaatttgtgtcggtggaagagactggttttaggaggtggaattatcaacgagctagatcggttgacccctgaaactgttgctgtctcatgtcaggccacggacgctcggttagacctcgtggctacaatccttcgcggcctgatgtataacgacagcatgataagactggagaaaggggtttgaggatgtgcagggttcaaagagtggtgaagagtcgccctccaataccattcttaggctagggtggagattgtagtttcagataccagaagagatggggatggcttaattaatagagatggtattttctatgtggctttccctaaggatagccactgtttcttgacatagtaaacctctgtatagaccctttaatcctcccggtaaatcttgtgcaaaatgtctcgtcagcgccgagcaagtgatgttatcttcttccatgagcttcacaaaaagactgccgtttgtaacagactatgaaagttagtcgccggtcgttgagcatccgaatatagaatgccattcaagcaagtctcggaggaggcgccctctagttaagagattggttccttcctcagccccgtcctaggttccagggttggttggggcacagatcctcatttgcctgttggccatcgtgacctgtcattggcgacggcgaagcactgaggattgtgcgtgacagccaccagcggcaacggtggcccaggaatacagcatggctgcccccgtgggcataaccttccaaacaaaggagtcttcgacggttgaatcaaagaaagattagcggtgcctggtccgtgcgccatgtgataattctcattcgaagccacaatttcaaaggctggagtttcttcgacgaaaaatcatatcagaccgttataaaaaaaacgtatgacgccactttctcttatccagaggatgaaatgtagaaaatggaccagtaatccacaagcagacaagtcaatcaaagagcctcgattttgaccttcggctcatcaaccgcgggactgcttttcaccttcttcactgtcggctcaagccctcgaatctcgctcttacaaagtcccaaacccgccagatcacaatccccgcagcgacgtttaacgggcaagcaaaccgtctgcccaagcccaacaagcaacttattgatctcatgccatttctcatgtggcaaccacgactgcagcgccttcctcgtctcctccggcgtcttagttttattccaaccccagagattggtaatgcgatgaacatgcacatcgacaccaattcccaagtgtttaccccatgccgcgctcagacagaggtaagccattttgggccctacgccggggagtgccatgagaccctctggagtcgaggggatatccccgccgtactggtctcgcaagatcagggcggtagctttgatgtattttgttttgttgttgtggaagccgactgtgcggattaattcgtttagtcgcgttgggtccacggctaggatgttggttaggttgagggtgctgtcggtgggttttgaatcctcgttctcttgtttgactttgatgtctagggctggggagctgccatctccgagctcggtgtgaagacgttgcatcgctactgccgtgactgtgtcttttgtctgggatgagagcatcagtgcgatgagggtctggaaccgacgatctcttggcgatgacgcgcgccagtatagctctgagcagcccattgtgtctaccggtgcagttgggttgtttgccctcatttctttcacgatgttgtacatcgtctcccagttggacgggggctcgaccttgactgagccatcttcgtcgcgggtttttcgggcggggagtcgtctttgtttgggtgctggtgttggtttctgatcgggctcatccttcacgatattgtacatcgtctccgaattggacgggggttcgatcttgaccgagccatcttcgtcgcgggtctttcgggcagggggtcgtcttgccggtgttggtttctgatcaggctcatccttcactatgaccttttgtagtttgccaggacttgcgctctgtttgaggacgcgtgtggttatgaggctcgcgttgcgcctttggcgcttcgttggtggttcaaggaggtcttcgatgtcggccgtgtcggcctcagagagatcggagagctcggagagcgaagattcatcctcacttttgacggcagaccaactcggagtcaccgagacagtttctggttctatcttcacggtcggagtcgcgtttgggttgtaggcgaaacttttcaaagcgctgacattgcagctacgcgtctgtcgtcggatagggggcgagagggcctgcagcaccttcgccgtgtcttttgaagtgcgagaagtgcgcatgtcgatttaacagcagttgaactctaagacagtcaatagccagtcgaaacggttggaaagtaatttcacgtgagtgtcctcggatgatcgatccatgggccggccagaacctccccaacctcggtgcttacagtgccgaccgactttcccaactccgtgggggcgcacttccatacacatctaatttataccgtctaccatattcgacatgcagtctcaggcctctccttttatggcagcaaagcgactctcgaaagagctggagacttatcaggaggagggagagaatgaaatattcctatacctacgtcccgtcgatgaggctgatctactactctgggaagctgtattgaagggcccagttggaacaccgtacgagggtaagttcacgaagtccagatctcgatctccggtcgggtcattccacgccgtcaatctaatgtggcaacaggtggactttggcaccttactattgaagtcccgccgacctaccctaatgcgccgccgaccgtccaattcacgactaaaatcgtgcacccgaatatcaaattcgacacaggcaaggtctgtttgtcgctcttggatgacgattggagtccgcttgggggtctcgcggccgtagtcaaggctgttcagctgctgttgaccgaaccaaatccggattcgccgatgaatgttgagatttcgatactactgcgcgatggggatgtggctggttatgagagtgttgtccggtacctgaccgaggagcagcggtgggtggaagatctggctgttggacggtgacgatggtttcttgaaccagacataccctaccgctctgcacattccgatcatctcatctcgtctcggctaccctgcgcctattatacatacgagtccccgaatcctcacattctgagccacggagttcacttttggcattcctaccatcttgcataccttgcatctacctacatacgaatcgacgaatcaacgagtcaataagctaagagtttaataattgagcacaatttttgcatgatcttcaatttcagagcgaagattaagactgaaagtaatcacatgaagactagcgtgtgctatgcgctgtaaatgttggagaccgctgttaaaacccgagaaacaaaaggtcaaatgcggcggaataatgaatgccagccataaacgcccaagaaaataaggagagacaagagcaggggtcgtcacgggtcatgcagagagatagtacaatgacaattgtcatgaagatgcagagccaatgcgatgtgctgaaaaacgccgttcgaaatgataatgcaagttaggcgagaaggcaaagaattgttcatccattagagggccattgcgaccacgacggcgccaccaaccatggcgacgacctcacgagccatgccggtagccatcgcggcggcattggtttgcagaccgggcttgccgacggtggtagtcgaggtcttgtgggcggccgtcggggtgatgactgtgatagaggtgatggtgctcaggctgccatcgggcaaggtgcttgtgctcttgaaggtggacgtgctcaggctggtctgctcggtggtttgcgcagaggtagttgactgattggtggtggacgaggtggatgaggatgagctggacgaggacgaggacgaggtgctcgtggcagtggacaaagtcgaagggatactggtagtcgactgagtggactcggtagtggtagtcgaggacgccgtagtggcagtggtcggctgagcagtggtggaggttgaggctgtggtagaggtttcagtggagaccgatgcagagctggtggagctggtctcactagtagagctggcgctggtctcagtggtctcactggtggagctagccgtggtactggttggctgagcgctggttgttggctcggcgctagacgagctggtctcactggtcgcaatggctgagctggtctcactagtctcgctggtcgcactggctgagctggtcgtactgggtgcactggtcgcgctggtctcactggtcgcactgggcgtacttgtctcagtcgcactggtctcagcagccgaggtggtggcgggctcagaggtggattcggcgctggctgaagtcacagtagacgccggcagcgtggttgcctccgagctagcagtagcattgtcctggcgcttggccagtctcatcaggctggcaatgacgggttcctcaccttgcagagcttcggcggcatgaaggtcagtctggaagattccatgacggaatttggcggagagagcatgcaaggcatcatggagcgaggctgccttgatgtcggcatcctggagagactcacgttgcgaggtcccctgcactaactctgctgcgaagactgcagacagagcgagcagcgtcacaaagagcaattgaagcaagctgatacgcagcatggtgagtagttgaagatcggccgatctactgataaggtggatgggtaagacgaggaagagagggggagaaagagcaaaagaacaaaggtgagattttagggaaagatgagtggaagaaagcaccaagacccatagtggcgattatatcgatttttcgtatctttcttgattttccgtcgcactagtgaagatacacccgagcatcatcggcgtggctgattttttcaccagtcacacatgtcggatcggccccaaacgaacgcttatacagagccgatgtgaactattttggacgttatactatatttgtactatatttgtgcaggccacgactacagcgcaaaagtaaaaagaggccgttctccactataattggccgggtctcagccctttagggggctaacaatagcaaccgtggaaacaagaatagaagtgttgtcatgcaatatttcctttttactccattgggagatttgagcggcaaaaggggtatgtatttcccctggagctctgattcgagcgtcattagtataatatcaacttgagtcagaacaccctgaactagttcctaactgtacgaataacaatatcggaatcccgtcggatccataacctccccgaccgatcgagaccgatcaagaacaccgaactccatctccatatcaagcgtaacaagcggcgcgtccggcggattcagaattcggttcgtaccgttgagtgcgaaccgatgcccctcgtccttcgcctgccagatactccacgtccgatcgatcatactgtggtgcagcataaaagccgggtcttgtggagacgtgaacagatcttgcagggtggccccgaggctgaaatgcccgccgccgtgcacgcccagcaccccgcccggccgtgcgggccagtagtccatgacggtttggaaatcggaaatattgggcgcggccaggagtcggtcgacgatggtctcgttgtcgtagttgctgctgacgaaattgttcagacttcggttgaaacagtgcgggttgtaatcgaagcctggcgcgggaagtttggttaatgagacgatgttgcggtcgaatgggcccatgtgcacgatcatgtctttgaagggtccgcatcgcacgcagccaccgcccgatcctcggggtatggttattgagccgccggaaaggttttgttcgtcgggattgtgttccccgtcgcccgagagggagctgtcgctgcagtcgaagagcgggctggccttgaggttttccgaccataatggccaattccagtacctggttcgtgttattacaatttggggtcataatgaatgaatgacacttacggcagatatccagagtacccacactcgtctcgcagggctttctcccagagccagaggaagtgacggtgccacgggaggaacagaccactcagatggacattgagtgtgtaattgatatgggtgcttatggtatattagtactcggtctctagcatcgatgaagctggaacctacgccacaaaatcatcgaatcggttccgcacgcctgggtactcctctcttggaagatgctggggcttcccttgcaaacacaataccgcattggtatagtcgatccgctcagctcgctccaactctcccctatgtaatatcagtctcaattggccctgaaaacaccagaaaacacaaaccattccttccgctcagcaatattctgacttccacacaattgctccggcagggagatgtcgatatcgataccgaacagggaggactccgccgaaaccaaagtccccaagacaatgaccaagaaagacggatagaaaccaatcatcctgtcaatcccacaaaaatcccgatctgcgtttaaaattgtcgcaggatctccctgcccggtccatgaacaacactatttataagtaaccccccactatcgagccaataaatcctgctcgtaccccttgtatgatctgtaagtagatggaatatttaagattagcctctttcaatgaactgcaaaaatacttggctatgcggttccaggcctgtcagtgttgtgagctgtcactcggggccaatgtgcctacatcatacatgccccataagtggcgatgcacatcttcccctgcatgaaatgaagcgataggggctctagtcgttcactgcagaccctccccaaaacctagccagctcgctccaagccaattatcttacttgtttatgagatgctttatcgtcagatctatgttgtacctaggcgaactgtcagaatttggtgtgcatacttggcccccgtattctagcggtggggaagagagtgttctagtcggattttaaattagctgcgtttgttgttacgtgctggattatttctaacagaagaagtgcattgtttaacgaaataacaggtatagagaggaatggaaaggaaaggaatcgacagggccgtaagggagtttgtggggtccttctaagtaaacgatataaaactcgaacgctcgcttacattcccttacgcatcgggaaggtaggtttgtccactggacgtactagatatgacctactagacgctagatcgtggtataacccccgggcaaaagtatatttagtccctgaatgctagcttctcgttatccatatagtcgtctaattgtaagacccttaggtgcagttgcctaagtatacttagggataatggtggatcgggaaatagagatagaatatagggtggttgtatgtgaactaatagctgcctctccagagaagcagcctatggggataataccgcaccgacggaatcaactccaaagtatctatacggacgaccaagttgattggaaatcaacttggctcaaataacaactcatttcatacctctgaattacaaccggtctgtcgggcgaatcgccattccgaaattggtcagaatccaactggcgcctccctaacatcagtagtccgtggacccgtttcactaaacgaaaaccaaagccttgttgtggaaaaggttatgtgtgacatccttggctgtactagtaatcctcatgactcttctatgtggaaacagggtctgttttatgtaggtgaatgtggggtgggaaaaggccatatcattagagcgattatcgcagcgacggtcctggttcaccgcaaggaataagtcatccttatggcgcccacatgagcagtttctgatgccattgatggtagcacgtatcatgcctcactcggaattttgctcaaccgatacagacgtgatggggttagtccccgagttcgcagactatgggctcggaagacagtcatgatcacagacgcgatcagcatggtcgacctggccgcattgtctacacactgcaagactgttcgatccctggctagatcatcaaccgatcttgttgcaggactgccctgggatcgattttacggggtgatctacgatgagcagatgcgccaggaccaggacgtatcatacagagatttgctacggaggtccggtacgctgacgtgcgacgacttggcaacgcccaattcaaaggccatttcttcgctctccgatccacaattccaaacatcaccggccatcgtcaaattgaattcgttgcggcatgtcatataaacgtcagaaaatcttcgtttttccagccctccacactcgaacaaaatcctcaggcccgaccgcccttcatctgcgagctgatgacttgcttggtttgcttaaggcgctaaggtcccatttcctgggtctattatatacactgcttccatgcctgatgttgatgtgccaaaagcggattggccggttcataagggaaaggtgggggatgtttgatgccaatatgacttatattgaatacaactggctaccaagttatcttgtgggctggtctttcactagagtccactctactggcctccgtcgctatacaccacattatctcgcggatttcttgaacctcttctcgatttttaccggtctcttaaatattcggtggcaataagacagctctagatttgaaagcctgccatttgcggctcattgcagcttttaccgatgatgtaatagctatcatcgtttcaagtaagtgatgaaccaatcttagccatgcaatggtagcgacacccactccaataatctggggatctgggaatctggggaaacatccatggctaagcaatctcgcatgttcggaaatgggttttatcctatacgaagtataatattgaacaccgttctcacaattgaatccatcacgatggaatgttccagccgcatcatcatgtcatatattgtgttcctccatacttctctcaaatcaagagaaaaaccaaagtaattctaccaaggaataccataggtagcgcgatgtcacgagcgaaaaaattgaatatatattcgtcaatccatcttctagccgtcctcgataggaattgagtaaaattgaacatctcccatcaattacacttcaaaaaatgttcttccaaagatcctcactacttgcgttcatttcactgcatctgggcttcattccaaggaccgccggtcaagtgcaggccaattgcctaagtcaacagatcttgaataatgatttgaataattgtatatgtgcggggggcaacaatgaatgccagaaacagtgtccagttggacctgttgcgccagttatgccagctccaaactgtgggagccatctactcggacacctgcacttggatgactgtgaacaccattgcttgacagaatcaaatgacttctgtaaatcctgttggatctggaacctacctctctgtctttgcttgcagaatggtggatgtctgcaaagctccaaaaacgcaccttactgggtcaaaatcacctcgacactagcgaccacgaatttagcaatcccggacattttgaacctgcaagaaaatcacaaactcctggctggatacgggtgggattttgggcaggagacggcatccgacccaaaaaccgagtcgctagttatcaactcagcctactcgatcacggagaatcaaattcacatgcacgtttgtaacattaataccaagatgcgcgactggttggctaccctctatcaatcctccccttcagcctatcaaacactggttgaaattccaccaccatatcctgctggagagaaaatgttctgccgcgcgtcgcaaaccgctgatcagactatcccgggggattcgatctccgatgatatcaactcagtcattcagcagcagcctgtttgcaagtactttgtgggtgcggccgtgatcagagattcgaagcactatacctgggtatgtgtgacggccgatcatcttagtgcggaatatggaagattctgtgcctgattttgctggaggcatctgtcaattgtcggagtatacggaccgacataccggaggattgtaatttagtttatgtagttaatcatggccccgtataaattgtgctaggcggccaatacagatatttttacacatacagcccagctgacagttatgagcccggttcgcactggacgagactagtattgattggtgtagtatctagcaccagctagaagtatctcgcgaagccgcaagccatacgaagctatatatatagctacccctatcgtctagtaatagactcggtatcgatcctctccgccataaaggaaaaactgaaggacgtacctcaatagcgtatctagttcgctaaagtataattgtatgtaacgcagaagaacgtctaggagctatgcaacctagacaccccgtcaatagatatcaaccacttcactttagcgaagaaactccggctttgttctagatagttgaggatttttgtgggtgacctggatatcttggggtcattgagggaactcgattgcgtattttcatattgggtttcgacgactgagtatgaaactctatgccaagcttgggttgatctcttgttttatagtgttgggtcgctcttgccttcccggctttatagctccttcctctctcagtctctcactctgcttttttgttttgtgtcgtgaaaccttgtcgtgtgcccttgatctaggtagtctagtatgtgagcgtgcgttatagataagccagctttaagcttttctttagacatgggatagagtagaaccactgcgaggaaaatggtctgcggaaccaacgaggaagatacatggagagcgtcatgaatacatatttaatattgacccaggtcctgcgaattcttgggcgaagcccttatgcacaaaacactaccatatgcacaaaacactaccatgatgctccgaaggctttttggaacaggtcataccccaagccatagcttcctgggctcacatcattgccaagtatcgcctcggaaaattgagtttgtgggtagacttcttgcttaggtcctgcccttctggctcttttcttacagccactgaatcctgcatatacccattctctacatcccatccataagaaacatcagttcccattgtgctggctattcagttcgcccatcaattgagcactctaatacattgcctatctctctgccgccgaagttggtatgaagccacttgtgactttctgggtgttcttggcttatgagcttgtgaattgaatacggcgacggttctcagtgggtatgatttcttttgccgcaagctggtcttggacgcgtcgcctgtgtcaagctctgttattattgggtcgggtagaaatgaatctggggatctcaaggccaatggtgaaccgtggatttgtcttgtgtacggggttgtggtcttgcgatggcccgagggatgttccatggttgttgcagcttggcaaggcggtgaacggggacagaataattacggtcgcagattctctcagctagcgagtttcaggtccaacccacttgaaatattctagaagctcacccttacgcaactgggaggtatggcgtcgggtctgggttgagtgttgacagctgaaaatggcaagaataccgaattaatgagacgatctgagctaaatatggccatatactcctgagatttgtcgtgatttgtcgatctggttgaggtcatgttagtacaatacacgatgtacagaaacaaggtgatgcgttgtacagggtaagagaaatagcatgtcatttgatatacggaatacgagtctggcattgttcaagcgagtgtctcaggtctatgtatagactgtttgaggcgagtggtcataccttggcttggtggcgtcgagacagacggttttagcgagtaaacaagtaaacagtcggattaatttgtgattggagtattctagaatccgagcgcgtttgatgttgacccctatgtagtttgacccccttagacccttttaatgacaatagcgttggaccccagacccctgaagagatcgacttgcctagatggagatgcgtcatgccaagctagggttatccaccaggatatatagtcggggtactactagtgagggtatgttgtgtaaatgggtatacgcgtctatataggagcattgataaatatagtcatacatacatgccagttcattgtctataatgttgtactcgtaagttggataggacctgacgatccaagaaacaaataaatagataatataaatgaaatatatcgaattggccaatcaaagccatgaatcgagggtcatccccactgttaatccaccgtcgacccttgctgatcggaacaaaacagcgaggatgtgcataggaccttggcatagcacagcccacgggtcttggcccaaaaccctttatcccttgctcttgctgtcttctcttctccttcctttcagatttcgtttctcagtctgtcattcactctcttttaatccgagcgcatctttctcccactctcgtttatccaatcgctcttttatttattctcacattatgaagtccacagtagcttccatggccacggccatcaccttgggtgcctcgaccgtccttggtgccgcaaccaacctccaggcccgtagcagtgatatcactccgatcactgtcaagggtaacgccttcttcaagggcagcgaccggttctacatgcgcggtgtcgactaccagcccggtggttcttccaacctgaccgatcctatcgctgatgccgatgggtgcaagcgtgacatcaagtacttcaaggaattgggcctgaacactatccgtgtctactccgtcgataattctcaggaccacgacgagtgcatgactgccctcgctgatgccggcatctacctcgttctcgatgtcaacacccccaagtactccatcaaccgtgccgagcctgagatgtcctacaacgatgtctatcttcagtacatcttcgccaccatcgagatgttcgccaagtacgacaacaccttggccttcttctctggtaacgaggtcatcaacgacggtccctcctccaaggctgctccctacgtcaaggctgtcacccgtgatatgcgcacttacctccgctctcgcaagctccgctccgtccctgtcggatactccgccgccgatgtcgacaccaaccgtctcgagatggccgagtacatgaactgcggtaccgatgacgagcgcagtgacttcttcgccttcaacgactactcctggtgtgacccctcttccttcaccacctccggctgggaccagaaggtgaagaacttcactggctacggacttcccctcttcctttccgagtacggctgcaacatcaacacccgcaagttcgaggaggtcaagtctctctactccaccgagatgactccggtctactctggcggtctggtctacgagtacaccgaggcgggcaacaagtacggcttggttactgtctctggtgactccgttactaccaactccgattacaaggctctcaagactgccttcgatgacaccaagaaccccactggcaacggcggctacaactccaccggtggtgcctccggttgccctaagatgcagaagcctaactgggacgtcgacactgatgctctccctgccatgccctcccctgccaagaagtacctgaccgcaggtgccggcaagggcgatggattcgccggcaagggcagccagaactccggcaccaagtccaccaccactgccacccagggctccggtgacgtcgctgctgccactagcggttccactacttctgctactagcaccagctccactggtgctgcccccagcctcaagcctttccagttcagcttcgcccccgctaccgtcggcctagtcactgtcgtgtcggctgtctttggcgctagcttcatccttctgtaatgctcctacctttatgaaggggcttcatacttttttcgattctccctgacttgtatcttttttaactggctttcatcttttaccccgtgatgatcatcgcttgggcttggcaaattggaggacggcgggttgctttccagttggtttattcagcccttggtatctagtgttcaatgaaacagagcttaactgctcatatattatcttgctagtaactgcgctagcaggaaatctcactaaaccgtaattccaatcaaacaccctcagcaagagcttgtctccgcgacttcgacagtggatcaaaatacgggatctctccaagcgaaacgacccgattaccctggcgcttcccattgtagtcactgtcctgtattagcatttcaactctgaccatataaaccaaagcagaaatagtcctactcacttggtagcagtatgataaaccgaccgactaaacacaccaacgtcagcatatcacccatcttcttcatgaagtaaatatcatacttatcccaaatagcaagatcattcctcccccatctaaaccgaacctgcaaatcatgattctcaaacagaagtcggttgactatatatcccaacgacacatattagcgaagtatccctcagcctgtatctagtcgaacttacacagtttcttcaagacctcgctctcgagctgcgtcacaccctcaatccagccatgctcgacctgctgtcccgcgccgaaaagactcttccagcctgtaaccgggttcgttcggatgagggggctgtttgtgttcaatgagttagtttttgcatgatcagtcttgggtgacggtcagaagataggcgagtagtgtcttactgcgtcgctttgaaatcaaaccctgtattctccggtgcgcccctatcaccttcgattaggtctatgccgtgttctttggcgattttgttgaatgcaggctgttttgttatcagtacatatacttaattgttgcacattttatccggtgaatgcagcgagtgagtgagtgcgggttacttggttacgtacctggtaatgcacgaccttcaactcttccgctaacttctggatacttggcgagagtcgatcgtacagctcataccccgatgcccagagggtatcgccgccggactggtcttcggggaggtctgttatctttagcagagcgtagtcggatgggacgcgttcgaatgttatgcttggatgatttttagcttatttccgcgttatgggtttgggttcagcactgcgttcagcactggggagtgagtaggagggaagcatactctgcatgccatccttggcttgcgaggcggccgttcagtggcttgtatctgtcgccgtatagtttgcggttgacctacggctgtcagatatagtgctttatgctgctaggtattcggaggggaagttacctcggaagaaatgacggaaatctcatcgtccaggtgaccattctcgtcgactgcgattcctcgcttgctatttgcgacggcgtggcggtggagctgtacataagcatatgtttttcaatagttgactagatctattgcgtgggatctgctcacctttgatgtactcggcttcccagttaactcgcccagcttctgaccgagaaccttttgctcctcggaggagatatcctggtcgcggaagaacacaacgccccgttcggagactatgtggtgttagtgtttggttcatttggtggatctttgttcagtataaaatatactataatagactcaccaaggatagccaaatcccggatcttcgcctcgtctttcagaatatcggtgagttgcacacgtgggaactcagtcccgataatgggtgtcgtgttgaagttctcgtactcattcaagcttcctgatgacttgagtggtgagcgaagaatactgggttgcggggtatcggtggccttggctttgatatctagatcctcggcatggtcctgtgtagtgattgctggcgacattgtgatgcgtgtgagtggtatatcgtgtattgatccaaaatgaattacgtcgtctattgttgaggagtattatgtgcggtttgacaagtatatctctcctcgtaagtcgtaagaaggttcgtctatgccgggctgtgatcttgcaccatcgcctctaaagtttcatcttcgaggcacggattggcctgtcttgtgatgacgacacagtgcttacagtttggacattgttttggtgggatggtgtcatctctatctcatgaagttggtcaattgagggttctccgtgtacatgtagcaatctgtgccgtatatggcgtataagagggtgatgaggagtaccaattgcaaaatcaggatttcatcgtataattactattgataggcttaacaatacgagttgttctgcgaattcggaggttacagacacatcgatagtccatattttgttctataaaaatataaataccgctctagctaagatattacctgtacaaactcgttgtatattcaatgcaatgcttagtcgaatgaataaacaaagcaaggatctgtgtaagtcaaggagtcattagggaatccatcagcccaacccaccgaaatcaagctgcttatgcagccgaggcaggaggagcaccagccggaacaatcggctcaatatcaaaccgcatatgcaggtcacgtctcaaaaaccaagtatggattctagtaatccgatgcgtacctataggccaagcccctagaacaagacaagccaccgccttgcccagctgcgttcccaggatctgctggaattcaggagtattcatatcccaagcatggattgttggtgtcagacctcttgtctcaggaccgggaagaccgttatttgggtagagcaccttccccactaagggaagggtctcatcattctcaacttctaccatgaaaacataccggagagtatcaatcgcggcgtcctgtttgtataaagctagcgcaacatcagaccatcgtggtccccactccattctaaaaatcgaggtggcaatgatagcacccttgacgatgcaatggtcgtaagaggacacatggtgtacttgttcatttctcgcattgcgctgtagagatgattggcggtatttcttcaatctcggattatttggaaggtaggtggatttaagactctctctaatctcgaccggtgggacaacgaacgaggattcccatacactgaataatggctcgtccgggggattggcttcgactagatcggcgacggttagtgtagactgggtcactgggcatgctgggccagctgggttggtgttggccatccaggcttcatattgagcacccgttgttcgatacttgtcgattttcgccatttcgggcgttggttgtaatatgtagatttggtctgggtttatattcgcggaattattacccatgtacatgctaatattcccgggacttgtaggtaactcaggaaggcctgccctgagatcttgctcggcggtgttcactggtaacggattaagatgtgtcgatatgccctgtgattccctggtctttagcttggatcgaacttgtgcgagttttgattgcataggggagctacgttcggccggagccagtctgtcattatcgccgtcgtcaccgtcgtcgtcacgtttccgctttttgtcctcagaggtgtcggcttcagtagacgcggtggcacccgctccaccttctggtactggcggtggtgcttcatcatcatttccaccgtcggtgttattacgacggaagaaattagcgactttcttgaatggcgaagagtgaaattcggacatcgtgttgaaaatgtcaaaatcagaaggatttggaagtcttcgggtttctgatcttgttagccaggagctgatatgcttgactggcttagctagatgctggactaagcaggtattatatagttcgaaacaaaaggtcattctaagagatgtcgagtcagtgtttacatccagtctatgttaagatgaaacagacggaacaatgaaaaagatctggagacaagaaggcttacacaagtgacttgataaagaacaaagagagccgagacagagcatgtgaatcaaatagatgggatatgaagtcctcgagtgtaagcgtatgatgcaatgagaatcacattatgcaaacaaagcagtgtctggtatgctaaatttagcttgaagccacgagtccttcaacgtgaaagaactcgatccgccaagttcaagtcctgaaatgaacatgttgagagtgatttcaatctcccaggaagcataaaacgtcacgaactcgcatgtatagattcatgataatatccaaaagtagatcagttgatggaggtattgagaaaatgaaagtccaaaagaattgactgatatctcgttagccctgaaggacttcacgtagtcacacatacaattaactgttagcaccccatcctgcagaaaatctccaatcccgcccagcctctccgatccctctcaccagacctacaacattatcaacaaacccagcttcaccgcgattgaccctctcccgacgctcggtctcggtatccgaactcgcagcacgaagattaatcagctgctgcgtactatatccctgcaagcgatccgcatccatcctcgttaaaatactaccgtccccacgccgctgggtccacgccgcctgcttaacagctggggcccagtactccgccagggtagattcatcgcgaccaaacgcgtagcacttggccagcggagagtcagaatcctctggtataagcgacgcattccagcgcgtgtggacgacttcatatctcttctccatgaagaagataaccggccaggtaataatccagagctggagaagcacgacaacccaccagacgaaacggtttgtgcggaggcggttgatccagtgcggggagtatattgtgacggagcgtcgactgatggagagaccgaagcttagagagccgcggtagttgagttcacggatgtgggaggagaggacgttctgcatggcgttggagtcgaagccggagacttcgcggtgcagtgtgaatctgtatagggaatcgagattagcagtgtattttgtgcgagtaggagcagagcatacgatttcacagaagcggggtcactgcagaagcgctcgcaccacatctgtaggtttctcgcatctggagagctgttgttctgctcgtcggcgttatctcggcctaggagggcatcgctgtccccggtgagactgatagcggcacgcgacttgggcggcttgtacgtgcgcgagcgcaggattcctccccgatacgccggtctgagatcctcatcgctgaggacttccacttctctccagtttgtgaccatgtatccgccctcccacccggtcagcatggtctcggccagatccagtctgaactggaagtctgtgactgtgttgcttttctctttcttttggtcattgctcgtttcggtgtgggtgccatggatggagagtagcggccgtggtggcagctttatttgtagacggaggacattgtacaactcatcgctgttgctcgagagcgctggttcgaggctgagcgagtccttgccgccggggagataataggccgagtcgattagccggagcggtcggatgctttgggggggctgtacaggctggacaggctgaaaatgttggacaggctggaccggggcgacaatgagttcggggtcatcggtatacggaggcggcgcgtcgtcgtccagagaatggagtgagtgcgacgatgacgcgtgttgaagacgacccatcacttcggtatttagagcgaagtaatcaaattaatgaaaatgatcaaagggaaaaatattttagagagaaaagaaagtaaaattgagaaagagaggggttttcaatgttagaggctctaagacctcgtattacacagcccagcaccagttgactgcctattctatttataccacctttcacctttcacttcatccaacataacacttgaaagatacaaatttcgggtccatctgttggcgatcatggcacaaaccaggacccctccagccataagtttgggaaatgtcgctgacaagatcgcacgtcggattaggagagacggtacagagaccattcgacatacgccatgatttgggactattcagagcatcgctgtgacagtcccgccactcccatttaccgttttgtagagtccaccagcgacatgaaacggctgtgttgttgaccacggtcgctaagttgctcgccgcgcggaacttcatgcagtcactatcctccaatttcttgttgtgaccttggaccaacacgtagctgccagtgcaaccaatcccatcgaacatcttcagtgaccatccgttggatacggtgacgataccattcacggtttgtgtggagactgggacggttgtggttgtggaagtcttagttgtggaggttttggttcttgtagacttagtagacgtagccttggtagtacttgagcttgtggcggctatagaatcccgcatcttgctcgccacaatactgagctcattggctaccatatagagaccagcagtgccagtaacagtgacaacagaagccctagtagtagtgctagtaggaggggcagctgacatggatgtggtctcgtgtagatatgtcaagggtacatctaccaagggtatatctgtcgtgaaaaaatatggatccttgttggaagttgtcgaggatacatctttaactgtcaatgatagagctttggtcgcaggtgcagctttagtctcagatgattttgacgtagctttagttgtagatgttttcacggatgtagcttcagttgcggatttagttttggttgtagttttcactgtagtcttcactgatgctgctttagcttcagatgtagttgatatggctttagttgcaggcacaggtggtaaggcagccgcagatacagatgagacacagaagtctgcaccggtaccacatttaccccttgtagaacactatagatatagtcagtctaggctgcgagatcaaatccgatattggtaaagctcacacattgacccgcaggacatggattcaaatagggaatgtcggtccacaacaacggacgttctgttccgggcacttggggaccacagactgcatcaccaattgcaactggcattgggggctcgccggcgctgagacaaacctggcctccctgctgcagattattgcatccgtaccatgccgaggtatgggtgttccaagtctcgatattggcagtggtgatactgtacccctcggcaatcttcgcgcaggtatcgccagtgcggatagtataaacgtagcagtaagaaccactgttcggtggaaagagagtttctccgtccccacagcatacgggtttcccgtgagacaaagaggagcaaacagtagtcgggttgaaggaagtgaatgatgctaccgagatactacacttggcagccagattgtcgcatgtatctccagtttcgacaagaatagagcgacatgtgtagggatagtaaatagaccggtcttggatcactttgtactatcttgggttagaatctggggtacaggatgtggagttgaagaagtaggcactaacctcgggtacagctacagacaacgcaactatttcatgaatcagaagaagactgcatagagcgagaaagatccctttttgaaaataccccatcttgtgtagacttgcctgagaggacgactctgaggaacacatcgcgcagctatatatatatctataaagaactacaccacaaatgtcacgcctgaaagcaacatcgcggaggtaacgtgcattgatgcagccagtgaataatatgaaacacagatatgcttcatacagtaaggcgcaggggccaagagtccccgaagggccacttgaaatcactcattctggaggacaccatgttgaattgttgtaaagaacaatctaaagtgcctcctccgccaccgtcaacaaagaaggtcgttgcatccgatgagcccccggtaaaaatgtgacctcaaatagcctttgttcaaatccttctctttcctcttcggagtttggatagcagattctctttgaagaagcgatataacttaccatactgccaagagtcttggctaccagggtaatagatgcatcaaaaccaccagtttgtgggagttaatgacaacaaaacaaaggaaagactaaaagagagacagatagatgttacgacactttatatctcctttctcaatcagcctcaattctttttgctgtgggacaaaccatcaaaacgatagcgctcatccctgggaccagttcaacgccgtatatatattggatgaacatggttattagcgaggattcaaaagctgagtgccattatagtgcgtgtgaccgagtcatagaacgaatatccaggggttggaataacaagactggctaagggcttatcgtctttgtgccactcgtctttgtgccacaattcaagggttagggacagggtttcagaaatagcttcttagaattgagacatcctaactgggtagcattggaaatctggagatacccaagatggcgttttgggagtgatatagatattctccagagctattcctcattcaaaggctaactcttgacacgcccatacatcgacgtgcgaccagcagagatgggagtatatggctaggagcaaatctagacttccagatacagcatgtttgtcttagggtgacggaagtgagctcaactaaatattgcttgaagcccaaaaggacctcggcggttgatgcatatggatcctctaagataattctatctgtattcagacttgattccttttatagactcttgttagcttctttcttttaaatacctcttagccatcgagaaaatatgcactctctaggcgtggtttatataaaactcctaagcaataaatacttagagagacatgtacggcttagtgatgaattcaggtatgctctgatgtattgaatgtcttcatgcagtttggcaaacctctctttgcttgctgttttggcacctaagagctttgtgtctttgtactcacgaagctattaagaaagctcatggcagtgtctagatgatcatcaacattttatctcacatcattctctcctcttcagaaatgtagacagtatacgtgcatcacgtagaaaatgtatgtttaggaacagttgaatacacctggattgcagcgtctgacctatagcgcttcaaccaaacagatatctgcttcatgaacacactactcgatgcatccgagattgagcacactgatactgtagccccatgccctaagacaagctctagaagtgcaattatcagagcattcttattgaagcaaagtgccttgagcttcgacgacatcataggtatacacctaggcatataacctcattcctcgttttgttaatcatcgcgttaaacgtttaacgcgtttggttcctacttattttgatttcttttttcccctgcacctctccttgttcaatcttcacgtatctatttcccagctttgtatcattcatcctctgcttcatcaccacaatggcttctagccagaatgtcgctaacctggatgtcgctcacccggacgtcgctcagccagaagtcgctcatctaggcgtcgctcagcaggatgtagcgcacgaggacatctctcaccaggacgtcgctaagcatgtcgctcaccagagtgttgctcgccaggatgcctctgcctttaatcgggctccttttaaccaggctgcgtggcttatcgccaaatcaggccgtcccctcaagatcggcatcgcgccattcacacctccgtctgcccatcaaatcgttgtcaagaatggtgctgtggctgtcaataccgttgaatggaccaagaagttgatgggcaacatgatgtccccctgggtcaagtacccgtttgtacccggaaatgattgcgctggtgaagttgtgcaggtcggtgacatggtcagtcgcatcaaggttggtgatcgggttcttgcccacgccctctccatggatccagctgtcaacaaatcttctgaaggtgcttttcaaatctacactgtgatccgtgacaatatggtcacagtgattcccgattggctctcttatgaagaggcttgtgtcattcccctcggtctgtcaactgccgcgaccgctttgtttcaccgaggcttcctatctctcaatctccctggtactcccccgggcacaggcccagaatggcttcccgaagtggtcctggtctggggtggatcgaccagcgtcggttgcagcgccatccagctcgccgccgcggctggttacgaggttatcgccacttgctctcccaaaaactttgaatatgtcagtaatcttggcgcatgtgcggtctttgattatcgtgacaaggccaccatccagcaaatcgttgagcttctcgggaacaagaaagttgtcggcgccatcgctgttggggacgactcaactgatgcttgcattgaagtcctcgcgaagacaaacggctcgaagttcgtggcccgggcctgcttcccgcccccgaaaagaattataagcacaaccttccagctattccgtgccgtggcagcctcggttcggtcgaacatcaagaccttcatcaaggcgaaacgcagtggtgtgaaaaccaagttcatctccggtacctctgcggctcataacgaggttggtgctatggtttatgaccacttcctccctggagctcttgccactggggtttttgttgctgctcccaagccgcgcattgtggggaaggggttgagccaaatccagcttgctatggattgccacatgaggggtgaggcagctcagaaggccgttgtctcgctttgaatttgtcgcgagccaatttcgggtgttgttcttgtttgctctcgcctgaaagggcactgcaggacctaggagactaggtattcaatagttgatgaaatcccaattcaatctaaacacaaagtgagtaaacttaaagatcaaggtcatatttgtagtgagaggaatatattctcaggagtacccgccttctgatcgatatgtaatatgaatggtacttgattcaaggacaccgcctacttgaatactacaatattacatctgtacgcatacaagattgaagaagataattgaaaacagaagtatccaaacgcctgcgagctctcgatatggcgagctaaaaaagattcatgtccaagaagaaaggtggctccggctggcctgtgacttcagacatagtacacccttgaacagtcgacaggttgcacaatttgtgaaacgagtcatagtccgagtcgagcagctccaagtaggtcgtagctaaattattcccaccctgcaaaactcgcaaagctttcttcaaatcctccaacttctgctgtttatcctccgacgcggagacacatgtactcggtcgatcggcatgtgtcttgacgaaatttgccgagagatatagtagcatgggagaaaacgcatgcgcctgtacaaccttgtcagacacgaaagccactgtcaattcacggggagcaaagggagtggtctcactttgaaaaagctggatcgggtgagcggcttcgccaaacctactatctcgtacgcggagtagagaggaaccaggatgatctcatcatcaatttccaccggcagggcctctaatatattgtagaaccatatcacggcggcattggcgagcatatttgtgaagaggcgcatggggtcgtggagttcgggcgaggatgggggtagtgaaatcagcatcagccgctgctgtaccatttggtatagtcgagtatggtgtttccagctatctccatggcttggagacgtcttatcaccgtgcgcggctcgctggaatgcaacgctgtgccagcatagtgtgatcaggacgattgtctccgcgaaaggcggtagcattttgtgtccggaggcctcgatctcatcatataaggagtccataatgactggcctgctgtgctggaagtctgactccgagacggggagatatatgcatagctggagatgttagtgtcactcagagcattctgtaaaaaggagtaattgctcactgcttcgtcatttagacttagaggccactcgtcagagatattgaggaaacgatcgagacaatatgctagccagaaggtccgtcgcttttcctcggcctcggcccaggcttcggggtgtgccatgtttatgctaatgttattgagacgatcaatctcgtgcaattttgcgagttggataatgcgaaaggcacgtcctgcagtaagccaggctcgacgatagctcatatagcgaaactcatagtgggtcagaagaagccatgcttgggctgcctgaagacaggccgcaccgctagattcaatatcgtgatcaagggtctcaataccggaccgcgcacggctgtagagagactctcgcatgtgctgtaaatgggcagatgacgcagctgcaagtgcccacattgcaaattgcaagcagatgtgagaagctggtttgttgaatctctgtgaccaggagaagtaccggccctggtggagcattggcgcgacagggtgtactctgtcgaaatatagttgatcccttcactagctgttagaaatatccggacttgaagggtaagctttgcgtacagatctgcctcgattatatctgagctctcatggtcaggtggggtcattggtgtaataggtgaggttattgtcgatgtctcaatggagtagataatgtcacgacattcgtcttttgtggcattggggatatagtcctggggtgggctgagcatttgaattgtctcgtcggagtgatatttctcactgccatccaatacttcgttgggacagagattgccctgatcacaatttatgatgctttccagtgtagctaacgataaattagcagggaaggtgtataggtcacatttcaacacaccaatgcgattgcgcaaggccttcaaatgtcccttcttggggccccgtggggagcgaacctgattcacaaggcagaccgtaccagaatcctcgcactggttacattgaggccgtcgcctattgcatcgaagtttctttttgcggcattcctcacaagcctaagttgtcagcgccaagagtcaccttatgagctaagtggctattgtctcaccagtccaggctgctgtcgtgagcctgacatattgaggagctgaatagagtgttgatgttctgatgttctgatactactgcgcctccagtaagaataagactacccgagtcaataacacaagtatatgtagtggatatttataactgtcaactaagactattgagtgcactccagcctgagtcgctcaagcgtcggcaattatagattaactatttgtttcgccagataccctcccctgtagaaagcttctttcacgatcttccaaatttggcaacttgtacttgtcgaaagtctactcctcttccccgatgaagtccgaagagaactcctacgtatggtgtgatcagcgctacatccgaaatggccccatactcatgacctcacgtctttcagctaatcaagatagtgcctgtcaagggtaaatggctaatgatctagatagctttgaataaacttccgtgcctgcgctgggtgcagcgttagtatttttatcacgccgcttgggtagcatagataagctggatggtggtagtaagtatcaaccagttaaccatgtttgtcgattgttgatcagaggttgaatgatctgtcatcctggtgttaggtctgttagccgaatcggttagttgctcaagattgaggttcggattgttaatctagtgtggcaggttgtgtggatatgccacgccgactggctgttacatatctcaaccgcggcacatgcagcacgtggacaatgatttggaattgataattcaaatcacgcctactacgcaacaagctggactagaggtaaagctggttctcggcctatttgagccaagagagtgtagcacgaaacagttgtgaaatgtacggggcattgattgtgtcattggctcgttcagaatatcttcttcaatctctgacgcaaaggtagtatggtatctagagtgtttggcggtttggatgtatctttcatggttgagataaggtcttggatgcaggtttccgtaataatctcattgactattggacagatataaagatcaattgacatgatgagaatctcggcccatgactgcctaagcgtatcagaaaatggcttgggttacagctagatcaggtagggctgaatatccggaaatctcacatcttgatctgctcctccgcgacgtgataacttgaacctgatcgaaagggtctcttgcagcaattctgatggaacctagtacttttccctcgcggctatggaaatagattgttgcgaccgagaacgtcaacacaccgtaacttcaagaaaaaagcttggatgtgacttaacctggtcgagtgatcatggtagcaataaatagatgcgcatggtacgcctttgccccacattataagttaactctctctcttattggtgaatattcccctgtgagagccacgcgaggctatcgcatacaccggggctacactaaccaaatacggtaggtacagcgtagatatactatcatctcattgtaatagttgattgctaattgatttctaaactaccatttgctcgggggaattaagcacaaaggcaatcaagccaagggttgtggcagcatccgctatctggacctgcgtcatcctactgccacctctaggactacgcggggcttatctcgtgcacttcagctcgttccggcacctattcacggcagtagatattgtgagattctagtgttgataggttctctatcgcctcgggccgaaaaggggttgtacgtatttggaattgttaaacggttatagtccttgaaccccatgtgacctgcggcgcgcggctctgctccccattgtgtacctcggcagtgatatggtgcttactcatcggtcattgttggaatctcgactagccagattcggtttctgcaggatctgtcgatatgcaatgtcgcagtagggtgtggctcggccaccccgttgcagcctcgagttcgggctaacggaatgtcccaggcggaacagaattgcattagatctcacaaattctaggcgtaaaatgcttcgtagcacgtgtgcctcgaaacccacgaacgaacacagtcatatcacgcttgatccagacggcaatagattctgtttatacagctgttcaaaatttcaatcccatccttaggcacaaaatgtggagtctaaacttgcccatactgggggcggataagaattcagataacctccgatgatcaacggttctagcctgttagcgtcgggacgggccggactgtgggtaagtccgcggagttaccaaactggaacggggtactccggtttccgtaccgagctgtataagctttccataatacaaggcgaaaacgggtaactctattactactatatctcaaacaggcaagaagggactggcaggaaggaactggcaaggcactgccccaaggcaagagcattcctgggttcctgtctgaggaaggaacgatattgaagaacatctaaatcaatcgccaccaataaaacagcatggttggtcgcgcgccgggcgctaatccctgatatggctccagcaccaaaaaacgccacgatctagtactagttcatggtccaccctagtggcttcaaccttatcgagcaattttatacctgggtcgcttcatactgattaatctatgactggtaagatcgaaataatttctcggcctcagttatctattgtccttactactctcggcgttacttctaagggtatgaaatcatgccatattatttgtcttagtcaattaggaacacaagagtcgtatatgggctccttgggctattgcgtgtccaatgcccgagttagattttcaggccgttgccggaatcccaatggttttgcaacagcctatctttctgcgcgactctgttaggatctacaagggacaatccggtttgattcaagtggcgagtggcggcgttggacagacataaattatttggcctcaacttttcggggttgcctttgatcaagctgcaacaatccggggcaatagcgcctgtgtgaatttccaaagaacccctccattgtgagagatcaatgcagcgccggtgtaccaagttctacgttttccctgcaacgcatacaggtcattgtagaaaccgtcgcggatagcctgagccgacacacttagcttgaatggcgtgtgagagttgagattgatgatttggggagttgtaatcgtaaagttccgtgcttcctgtaggttctgaatggctcgaatagtcgcttgctcgactgccaaccgcgtcatatgtgacgggctgcggtaccagacgtagaacactcccggaatgcggatgcttgtaatttgggaagctccaggttgctgaggaatatggtacgttgcagatgagttgttctcattgatccactggtacccttcgggcaaaccagtgttattgggtagtagggtatagtagcccatataggttcactgcgagaacatctgaagctcctgtagattgaaattgaatggcctcatattttctaaagttgggggaatgttgactaaaagcttagatgcttggacgagcttgaatcccgtggtcgtcttgacgacgagtgagacgcctcgccctgtttgtggtcttgcagcagctgtaacggttgaggagatgagagcatctgaacccagctcagcaagagacttgacatatagctcagagttgtttttatctgcggcgttgagcctagcacctgctatttctctcaagtatgcagcgtccaccatcttcatcacgttgactgttaactgctgtagtggatttgaaattccctgggagctgaaataaatattaaaagcagcatccgagatgttatatttgacaaggaagtcccccaatggtaggagcaggtctggaggaacaggctgagggatttcccaggtagagtccagccaagggtactgcgcgacctgaatggcccatccggtcaggtttcgactggggttgaatagcacagggtttcctgtattaaaatctgtcagcgagatagtggcattagattcggtatatttgacaagggagatgttgaagtgggcaaaatagtcaagcgcgatagagctgttcaggaacgattgcaccccatagtccacagtgagaccggtagctttatcagtgtaggtgtttgtgtggccacccaggtgcttctttctttccacaaccactacgctctggcccatcttgcgcaggttgatggcggcatatgttcccgaggatccccctccaaccacggcaacatcgcagactaggacatctgctttggcataatttttgggatcgaatgtattgccggtgattgccacggctagccaaaatgtgaccacggaaggaagtcttgacagaaacatgattcgggagacagcttgatgtattcggttgaggttttgttttaatcccttggtatttgaacacttatggcgcgatatgtgttaacacacagccctttcaattcatatttctaccgccaggaggtgttagtcagtaaatgcaatccaggaagtttccgtccatccagtggcgactgctgtagaatctgcactaaggtattagtgtcactcacgcttccagatggggtatatctcactaagttcgttgttcaacaagacccagttcgtctattttattagtttcttgcggttcaagagtctagtttcttgaaactcccacttcttcagtgttatctgtcggcgacaaccattgcaagaaatagcacttctatcctccctcaggtttcttgtatccgaacatccgacaacataccgacctagggatgtagcggaaagtggggccgtcaaataagcgttcgggtgtgggttgatcgtctgcaggtggtgtggatccgcacataaacagttgtcaagagtagaatagtttcgatggtgatattcaatgtgagggagtcgagcataggtagggaaggagcggagttctgctttggggaagctactatcggttttgacaaatgtcgtccacaaaccccaacacctaagaaagtcgcgctggaccccaaactcccaaccttccaagcaaccaccccaattattccctaccagcacaactacaccaacatcaaaccccgaagcaagatgaagctcatcctagctggcgcgaccggtctcctgggcactgagatcataaaacaaagcttgcaaatccgcgagatcactcaggtcgtcgcgttggcccaccagcccgtgcagctcgacaaaagcatcgactcatcgaagttgaagattatcgtcctttgcgactatggtgattatcctgacgacgtgaaggctgagtttgctaacgccgacgcgtgtatctggtatgtctcgggcagcaccttcattgcctaattcaaactgaccacaacaatttgtgcgtactaccggtagggctgtctccgtcacacccttacgtaccagcaaagccgagctcaatcgtgtattccatgattgcaccaagcttgggtttgaggccatgtacgaggctggaccggcacgtccctttcgtttcatgtacttgagtgcggatggaatatttcgagacccgacaaagaaggcagtcatcatggcagattaccacatgatacgagtaatggattcgaatcccagagctccgtgattctagaacttacgctaatgtcgtgcttttggtgagctagtgcaatgcagagctcatggtcctcaaattcccaaccgagaacgaaggagttgaagtttgcatcgctcgtcccggcgtgattgctaatccctcgacatggtcgagagctttggtggccaaccttttccgtatcgtcggttttttcggacggtcccttccgaatatacaacgcagcgagcttgcagcggcggtgttgaaccaggtcatggatggattcgagaaggaagctctcttgaatgccgatctcgttcgcattggacaaagggagctgaaattcagcagtatgccttatcgatgctgaagatagaaaaggaagttgagtgccaggtttgaggggttctcctcaaactgaaaatttggcattgtctctgttttctttgatttggaatgtcactatgctcctactgagaaaggggcgttggtggcaatccacacgataaatcctttttttatcatacccgaccacaaaccaattgagtccaagttgcaaagtctctaatcgaagcgaattattccgcgatccatcacttttcgtacacagacatacctagaacaaacacatagacgtattttcctaggtgatagtggccaattcctgatccagtggcattgaggcaaatttccatatattatctctcaagttaggtgattttgacagtactagcctttgtagtgcgaggtttcaaacatggactacggacagtccttttgatctattagacctactagtacgaccacattataacgccaaccgatgaataaatttgcagtccagacaacttccctcccccacggagcggcaaattccatgtgggcgactccgcaaaatgtcatgaatggtcataatgacgatgcagaatccccccagcctataactaaggccccatctccaagcaccgacaaatctcccaacagacgctcgataattcccacattgaaaatggtcactcccaacgatgctcaagccctgaacctggaggcacgggaacaagaggatgagacctcggatatgaaagatcctgttgatgccggttcctctgacatggacgaggaaatgagtaagtagcttcccttgaacaattccgactttatcatctccagacctgctaacacaaatcccagtccaggactataggacgcttatggataagaccaacctcgtggacaaagaccgtgttcaaagcgcaaaggctagggtatccaaggcctactatcaaccgaacgaggaggcaagtgatatttcttggcggcctgatccgtcgggtcatccgcggaggactttctaggtcgttgtataggagtatagttgattccttctcagagaatgaatgtcatattttcattcgctttgtgcacgccagtattgcccacggagcataggcagttggcagtaggatattcgggagtctccataacctctaccatgtgagattgaaaactacgctagttttagaacccttaattctagtaaaaaaagttagacactctgcatatcattgggagaatggtttagtggccaagtagacgttaaatcctactggtcaagatatgccgaccccggattccgagctaggtcatcatgcagctaaaagttaagatgtggcctgcataacgggagatctacacgatctagccacgcgggcctagccaggatgcaaaccttgaaagtttaaggcggcaacacgggccttctacgcgacatcaatgtgttggaaggaagcggaagagataaataaatcgtgtaaacgtgaaaaatcaagtaaatgctatatgtacaagagtcatgtcgaacgccgtcccaatttgtgcaaccggtttccacccgctcaaagctttccctgtgcctccttggccgccttggcgtgacgctcgaaagaggacacggggggagcggagttggggttggggtggtgcttcttgagcgccatgcggacattgtactccaagtcgagagaggccttggggtcattggtcttgggcttgaagtctacgacgagatcatccttgacagcgaagacggagtcgatggcgagatgagggtcgtcgctcgggtagatctggttgatgacggtggcgtagtcggggtgggtaatcatgaggtggatgtgggcgggacgcatgggcgaacggtccatgaggttgaggaggacaccggcggggccgtcggtgggcagggagtaaggagtggggtggtagcagtaccagttgaattctcccttctcatttgatcggaacttgccgcggaggttgttatcggtctgggtggggtcctggaaatcgtattggccgttggccgaggcttgccagatgtcgaggacagcgccgacgatcggcttgccggtctccatatcggtaatggcaccgtgcataaaagtgacacggccattaggcttgggatcctggatgatgctgtcgccgagagcgcggaagggggcgttgggagaccagaaggggccgagaatgacgttggatgtaggggagagaccgtcctcggtgatgatcttgttggcgatctcatcgacgagactgatttgaacagttagctttagcttttctttttttcgcttttgttttctttttttttattagaagcagatgtgaaacttacgactcaaggccgatcacgtcacaaatacggtggccttcgttccggataggagtgctgatctggccgatagagttgataaactcaacgccgagcatccactcggcggaggtcaactcaacctcacgagcaaagtcgtggatgtgcttgataagagaacccaagaccacgcgagcacgctcgggggtattggggcccatgccattgatgacagagggggtgaagttggggtcgaactggcgtgtggaagacattttatattattggagagagctgtaaaagtcaaggaagtcagggcggcctttccaggtctatatacacgataggcgacggcatattgttcggctggtcgtggatgtggggaagtcgcaacggttccaaacccgcaaaaatcccgttgtcacctgccgaatgtcgcgatcgcgttcatccacgatggttccgttctggcatcggtcagtcctcaacagccgaggggcggctggtctcctattatatcagcgcggggtggccggggtagctcttatccgcgggtaagccccggcacctgctttcaccgccttttgattggttcggcttttggtcttcctcacgtgccgacttgccgatgtctggagtttacggagttgatatgcaatgagagggcaataatacagattctattggtatagatctaattcagctatgggtcaaatcttcattaatactgaatttctaccaaatcgctcacctcgtaatgtcctacatcaaaatccccacagtctacctgctgattgatcttccttaataatgccttcaaaccctcgcggtcttcgtcgtcacattgtggccaatcctccctatcttcccccccctcgccttgggtcaagaaactgagaaggacctgtaccgctatcaaacttcatgtaccggtcacacatcaatgccggcctaaggtccagttctttctcaaaaggcaactcattgtacgctgaatcccatgcttcattgtgaccaattgcaaagcgacagagatatggaagacctgtttcaaatgaggcaaaatattcattccaccggcgtggataatgatagtaccagtcctcgcccctcctgtgcttgctagtttgccatttcattttggatatcggtactgggcaatcgtcaatgtagtattcgacgttcgataatctcacttggaataaaatcgtacaattgtcaaggtagagttcatggagtgttgacgagtgcgagagaatccaatcaacctgctggtcttcgaaaaaggagaagtttcccagagtgagcgattgcaaattgggaaagtgaaccccttcgaggctgaatttaggataaaatccccattaaaggtcggagtatagagacagcttccggagtgatcccatcgtgggtttcagccagactaatgacaatgtatgtgcgtagaactcacgcacttcctgtttctgttatatctcgccgaattagtataaaatattatactcagcatatgttgaagatgtagactggcttgtgttactatgtacctcgagttctgcttcagtacacgcagggtcgcattcatgcacaacattcagtctcaacgaactcagcgtactcagtacttgctgtaaatcttcgctcagtggtgtcacgttctgctgatgctgaatccccagttctttcaacggtcgctttaaagacactagccccgtacccagccattctaagatggtttcgcggtattcaagtgactggggtggataaaaccaaccgcctcgcccatcgcggtttatttgtcgaagcgcagaacaacgcttttgagattcggaatatttggaagcataagtaggagctccttccatttgacaggtagttcaagctcatcgttatctgtgtcggggtcctaatgtgttgcgtattagctacccattgactgcatgacagtgcatatctcacgcacggatataaactccacagtattgaggcggatcttgtgcacgtattctttcaactgcggatgtgttatgatggactcgaaagcctcacaacttatatcctccgtaaacagtgaggctgtggagaacagattcttcgttgcagaggcgcgtaacatgtggtttgccagcctcagggccttgagcgtttccgtgtccgacagagacgtgatgatcgcaagtagctctgagggaagggctaataaggccatattcttgcagtggaagatatgattaccgatcagaaaaggaggtatcagaccttcttatagaacatctggtccgatatgctagacccaatgtgactttcttggcgctgttttctaggcatccttagacagaagggtggcggttagcttgtgtcgacggaaaatcccgatctagctactgatcgctctttgtcctttttattctttcaatcttcgtgaaactccgcacaacccctaaaagtttttatcttatctacacgggttagctcccgaggtcacctgggcaactttctccgtaacgcgatactcatactactgcgagttcataggattactgtactcttcctgacgaaaatatcagcacagacatgatccgtacgttaggcaaattataaggctaaattcattaaaggatttccagttcatgttcaaagatcataggctatccacaagaaaccaatgcaataatcaccaagctaaaacctctttctgagctccacaggccagggccgcacagatctgctcatccttctcgctgacatctgcattgcatgacactttcggtttcgccggccagatctcccggcccgcggatttctcacgctcaaagtgctccgtgatgacatcgcggactgtgctctggaagaacagcggggccttctcgtacttagggtgaagctcgccgctcgtaaagacattccggtcgaggttcttctgtgcgttgttgcagaggactttgtcttctcccatgacgcgcgcgtacatctcactgataagcttgaagtctgtctcagaggagttccggttccggtagatctcgtagtccatcttggagtttttcgggcttgaggggaggaatttctgtatcatgatgaagtgcggcctgtatgtacatgttagacgatgtactattggagaaagcacaaactggaaacacttacgagacaaccatggcagacatggggaagtagtaagtactggccgtgtaaaggcccttctcgatttgctctggtgtagattcgcagtggtgttggatatgtccatctttgagatcactgtcgaaagattccaggttaaggaactcaggaatatcggcgtgtgttgtagggcagtggtaacattcgttgaagttatccgccagaatcttccagttatagtcgccctcgagcgcataagtgtgatcgagatcgtagtcatcgaagttataggctttgtagcgttcttgcttgtcgacgtctcggaaatggtcttcccatgacacttccgggacttcattcgcatccatgttgacccagatgaagccgttgacgtcgaccttcagatggattctgaagagaccgttctgctccttatcgaagttgctcagctcttggtatttcgtagccttggcgagtttgccattcagtccgtaggaccagccgtggtatcggcaagcgaggatttgcgagttcccagatccctctttctcaacgaccgggtacgcacggtgtctgcacacgttgtggaatgcgttgatgttaccctgtcggtcgcgagtgatgatgaagtcgaagcctgcaagctcgtagcggagccagtctccggtgttcttcaaccgcatgctgtgggtgatgaagagccatctcttcgagaatatggctcggcgctctagttcgtacatctctggtgaagtgtaccatgatgcaggcaaggcacgaacggctgaagcttttgtttcttccttgggggcagtggcattgaagccgaaatagttgaacattgaagccatgattaagtaataagaaggtacagtggagagtgtcttccagtcttttttgctttaatggtaatcatatcgatccctttatacgctccagaacaatttgatgttagactgatagccacgtctatacagcgatcatatgaacgatctggttccaatttggtaggacaacccgtcgcgaggcgggttgatcttccaagaacagacatcgaacccgccaacccgccaacccgccaacatagtactacaatccgtactacaagccgggagacttgacactattgttgattattgggtcaaatgttatcaaacccgacatatgcttgggcagccattctctagttctacgctgcagctaggccggcatactacctgtttatctcgagtccatagataatgtagccggaaatacttcgtatcacctacaggcagtttgccaaatattcgttcattgttattgtaaaagagagaagcttaacagataacatataccaagtcaacaagcacaacagaagtctcccctcgtgttacaatgtgcatataccggattaccccactaacctacctagttgaggtaggagacatctcatacattggaattttgcaattatccttcttaaataataaaaacaggctcttcgggtttgatacactccagcagaggcaatcaagcggcttcatctgtggtgctcccactttacatctcaccttgcatccacactcccgccggccgatatcacctcccatcgccgaccaacccctcagaatttaaatcaaaggacctctgatcgccatagaaaggctgctgccagatatcccatggcgtctagattctcgagatcgagtattcccacagtcagcaggcccagagctagcacggttaacctatcaaaccatatacggacgggatattcatccagaagtccctggtgatctagtggtgcagggtgagtacctgggctggatgccaaaaaagcgcccggaagagtaagtctctatcaatctctaggtcctagtggaagtaaccggctctgatattccctcctgctgatccgactaggctgattgactattatggtgccacatttgaccatctcgtcccggctggggatatcaaccctgaggtgttacagattaacattattgagattgaggatgatggtggtgtttatgcgaatacatggctttcgtttgcggtagatccgactgagtttattgggaagagggtactggcagtgccgagatgttgccagaagagaaaggggactcaggatcgctggcgggtgaatgcaatgggggactagagggttcatgggtgggaactgttgatgggaggatttagttaaaggtctggagaaggatcaaaaatcgggcggaggttgagaacttgaattgatatacatgcgctgaattctcttctaacatgattaatacgggtgatgccaaacactggacatgttttgtcttcattgaatagtagtctttctcgttgtttttctctgttttcaagaggaatttggtcgtattcgtataacatcgtcattggagaaaagtaaattgcttccgagggccagcagacacaatgtacgttttccttcggataatgccacgttgaatcttcatccagcatcaagagtcttacttctttgcatcatgcaattcacctcgctctttcactagattcgaaatcgcaacgctggcatcatcccccaacttcgcgaatccctgaatcacaccctcacgatccccaggacgcatttcctggctcatcttgaacttcccctgaagcttggtgatccgaatctcaattccaacaatgtttttcttcaggagatcagtgtacgacgtaggcgcatcagatacctcccacggctccggtttatcaccaccagtataccccatcgacctctccgaatgctgcgacagatcatgcagctgcttggcgagaaatgcgccagtctcgggtgttttggaatcatagtatagcgacatcttgccgtacgcctggacggcggagtaattccatgtaggcacaaccctcccggtatctggctttgtctcgacgtagaatttcggagtcacgtagtgctcgtatttgccattgaagagcactaggacgtcgtcgtcgagttcgagaacgttcggtggcttgtcatccacggcctccatcattgacttgacttgtggattctgcttggcgatgtgggcgcggagataggcgtctgtcttgcctgtttcctcggggaaatccaccacgaatggggcatgggtgcactgtaggaagtcttgctgggaggagttcatgccggtgatcaagaccccgagtgggttatgccggatgaaatggagcaaggcctctttgtccttctcctcgtgggcgctttggaagaacatgttgaatagtagctgggaggttcagaggatggggttggaagacaaagaggcgtgaagacaattgtgtagggacaaaagacccccaaaatgtcacattgtcggatcgttgatttgttatcaatggccaaggattcgtccactaaaggcatgtgcaaccggctgcagagacccagcggggcgggaaggcgcagggactttggcatttccccaccggattatcgaattcccgagacaaggcgaggagatcacataaaagttggaatccatcattgacaaggtcagacttgagatttatattgcgctccaaagaaaagcagtgttgtcctgggggatggtagcagtctatcatcgttcatatacaccagattgggtatagcgcaatctagcagaaatatgaagggctgccattggtcgtctccagtaggatccacttttgtctacgacacaaatccacacacaacttgatatacggcttgagacactaccaccagaccccggtataaacggggcgcgagtttataataaaaccatccattcgatatataagatagggggatagaaagagggtataggttgaacgcaataaaccgtgaaaaaaccagcatagaagccacacaaggggaactagaaccaagactccatcgctccaaaacaaaagccacctgcgtaaaccctcaagatacgccgatttttgagtaccagcaggtcacaagaccccgcatataacaatcgaatcccaatgactatctgtcaatgagatcagagtagaatatcaatcaaacagagaaagatgaggatagtctggcatgcgggtcatcgttcagaaaaccaacgcagctcgatattgcatcgtaatgtgttgacataatcttcgtcattcctcatggaacattacattgcgagactggctgagcctgcagccgcagatccccagcgcagttttcgcagcccgccgcggaccgcttcctggccacaccccactgaggggcgaggggtagaaacaccatctcccaccattccgagctcggctcgcccaacctcacggccaatcatataccccgcggaaaaactgattgcggagaatagaacgacaacacccgcgctgatgacccatgtcatgaccgtggggctcatggccgttgttggatccgtcatactcacgcgacgactctttttcgaggcaacaccgcggtctttgggagaacttgaacgacgctttgctttggaggcagagtcagctgataccgccggtgctcttacgcgtctctgtggtactcctatagacgggcttgattctggatagcgcggcgaggatgggctctcttcgtcgctgctatcatctcccatggcaactgatgggccgactagtcggaatgaagcaggttgtccgcttccagggggagccgccggggtatctgatggtcgactatcattcttcggaaggcctctggcggcagccgcacacgaaagaagtgtggatagactggcacgaagggcggcatcgtggtcggcatgatgggaaggggagatcatgttgtaagggctgtgctgatatggagatctccgcgatgaccgtgggttggggtaggattctcttcgaggaacggtacggcgagtagaggcagacgggacactagattgtggacgccgtgcagaccatccaggctccgacgtcgctggcgggtgtgtgaatatgtttggttgaggtacgaaaggtgatgtgttgattcccatccctagggcagtagaactatcatcttcatcatcgctggaggcagcatctgaacctgagaaaaggggtacagagtgcgcggataatgcagttcgcagccttgggcgggtcatatcttcatttgagctgctgagaacatgatcagactcgctttcgctctcctcatattcctcttgactgctactggtttggctggcatcctgcgacgcataggccgcctgggcagtggtaatagcggcaagatgttgcagatggcgtcggcgactgcggcgctgatatgcgcccgcgcctctttgctcgacccgtaatccggttgtaattatatcttcatttgtggcagcagaggaaatggaggaagaggagggttgggaggacacgtcgatccaagaatctatgtagtatcgtagtgagtacattatggagatctgggagcgattttgtatgcatattgaaatttcaccggaaagggggtaccggtcgcattataactacataccctctgatctcatgggcgccgcacccgatggctgaggctgaccgttatctcgaagcggctgatggccatcgcgcgtcatccgacttgcggctctagactcacgcgcctgacctagtaggtcgcagtgatttggttgcatattgagggttggaggaatatgggaggatatgggcggagacgaacaaaaatatagaaaagagggggtcaggccaccctggaatggagcacaagagagcggtcaacgtggggcgggagagattatcttatcaaatgtggagtcgatcgatcgatgcccgacacaatgtatactcctttctgctaacaaaaagcaggagatgaaaggggttgaaagggatcaagatgattatgtttctctgtaggacagaatgaaaagagacaaaagaaagatgaagagacccaggtggaaagaatcgaactgatgaggtgatcagcggaccgaacaggtgatttgcagctcgtgacaaggggcgaaagacgatgcgaggggttgtcagaggtaaagggcgggtgttgcggttcttattgtagattttgagatcagaccttctttcatcaataatccgatcaaagaaccttggagccttggaatgagttgtaggcaacacaaagaatagtctgggcaaggcggcaaggcggttactagtggcaatatacttacaacacgaagaatgaaaaggagcaaagttgatcaaaatgaaaatgaaatgatgtatcaaattaaagatacctgagctaaggtcatattacacataattaagcacgaacttttttctctcaaagaagacctgagacccatgggacaccgatatgatgcggaaatcaaacgtttaaaggaaggcacctcaagttcagaaagtgaccttggtacccttgaactcagggatgctgcccttgcccttgttgaggccaccacggccgccacggtcgccgaagccaccacggccaccgccgcgaccaccaccaccacgtccaccgaaaccaccgccgccgccgcggccaccgaagccaccacggccaccaccacgaccaccaccacggccgccgaagccaccacggtcaccaccggcaggacggggagtagagaagtcaagacggatagcacggccctcgagctcgtggccgttgagagcagcgtgggcagccttggcctcatcaatggaagcgaactgaacgtaaccgaagcccttggggcgtccagtctcctgctcagtggggagacggattccgagaacggagccctgggcgccgaagacctcgtggagagcatcctcagtagcgctgaaaggaaggttaccaacgaaaagagtgtcgctctcggggctggtggtgtcaccgtatgagcgagcacgatcctgggaacggtcggcaccctgctgggggttggcctggcggggagcggcgtagtcgaggttgatggtacgaccatcaagatcggtacccttcttggcctccatggccttagcagcatcggcggcgttggtgtactcaacgtagccgaagccacgcgagcggccagtctcacggtcggtaacaatgcggacaccggaaagctcaccgaactcggagaactcacgctggagccactcctcgtcgacgttccaggacaggttaccaatgaacaggttggcgacggcaccctcggggacatcctcggtcttggacttcttggcagtggcgtcaggctcggcatcagccttgcgcttcttggagacaggggtctcctcggagtcagaatcagagctgtcagagtcggaaccagactcggagtcagaagaggccttcttggcctcagactcagactcagattcagagtcggaagagtcagaagactcagccttcttctcagccttcttgggggcgggcttctcatcctcggactcggaagagtcagagtcagagtcggaagagtcagaagactcagccttagcagcaaccttcttctcgaccttcttgggggcaggtttctcctcttcggactcggaagagtcagagtcagagtcggaagagtcagaagactcagccttagcagcgaccttcttctcaaccttcttctcagtcttcttgggagcgggcttctcctcctcagactcggactcggagctggagctggaggaagcatccttcatatcctcatcagactcggactcggactcagactcggaggagctgggagtaggctccttcttcttgttggtcttcttggacttctccttggagatgaccttgctggcaacggccttgctcttggcggcgggggactgggaagccttggtgacaccggcatccttgaccttgttcaaggccttgctggccttaccggccttgccggccttatcggcacccttggtagatgtcttggacatattgaactagaggaaaaatcaatgttagccaatgctcttcgatcaaatggaggggactcaggaagagggcttggaggctggcttgtagcttgggtagggtggcacatactttagtgacaagtgaaattcttgtagtatgtgcggcaaagcccacgatccctcaaagcacccgtgttttggatgtgtaaaatggaacaacagccctcagaagaactgccagaagtgaactaaatcacagctggacgttaacccactacccacggacggacaagttttcaagcccacaagcaaccgacagctgatactgtctagaatatgtaacccacgaggaagatgtcccacagagcccacagaatagatgtatgtcaagcccacagccctcagagtgataagaagccctcagagtatccaaacgaacttacgagatagaacccacgcgactgcgttagttagtgtgtagaggtctcttgggtagtcaagagatgggataagtaaagcgacctgagacggactgcttattgaacgggggatgagaaaagaagtagggaggatggaaagaggaagagaaaaaagtgtgaagagctggggaccatcagctctgataaggaaaaatttttgaaaaaaaaattcggaggctggcagaaccactccgcctgcctaaagaggctagcgcaggcactcggtcccaacactatgtgggtaccttgccagtggctgtcgacgactcacaatcgcgtgttcacttggcggtgccttttgcttttgtctacgtcgtgtacctgctacgtcaattcttctgctatcactatactcgtccaggcaccgttcgacttttttttagctcgatagtcaatgggacgataagtttccattggcctttaacgtgatggcccctccgacaccctcctcgcaccgccctcgcaagaagagaaaggttgcgatctcccccggctcaaacaataacctgatcttggatctaggcgatgggaagcaatctccagcatttccactagtctcatttttgtgggctgctcgggccggtgtgtctcaatggctgattctcccacttgtcctcatggccgttggcctgttccgatgggctgtgagcttatggggttactctggtatgcgacattgtctcttcggaggtcggtacatattttaatatcttctagggttccaagttcccccgatgcacggtgatttcgaggcgcaacggcactggatggaaattaccacacatctgcctttggcaaagtggtacacatacgatctgcaatactggggtctcgattatccaccattgaccgcatatcacagctggctactcggaaagatgtacatttccctacctgccatgcattgtggaatttccaggcctcctgctgacccgtcgacctctctagtggctctgccttcgatccagcctggttcgccctggacgcctcgcgaggtttcgaggacccccgtttgaaagtttacatgcgcgccaccgtcgtggtgtctgaatacttggtgttcatcccggccgtggttaatttccttcgccgctacactcggatgcagggtgttcatgcttggtccgcctcaattgctctcgtagcagtcctccttcagccagcgaacatcctcatcgaccatggccatttccaatataacacagttatgctgggattggtggttgcaagcttggacgctatcttggcggggcgtatgctctgggcttgcattttcttcgttggtgcactgggattcaagcagatggcgttgtactatgcaccagtcatgtttgcctatcttcttggtgtctgcacattccctcggattaatattccccgtcttgtgagcatagccctcataacattggctagttttgctttgctgttggcgcctcttttggttggtgcctccaatgccgaagctcgaaaggcatttgcatcttctccggtgccgccgatgttgcaggcacttcctatccacatggacaagaatgctgttgcatatgggctattgttccaactaacgcagatcattcaccgggtgttcccctttgcgcgtgggctcttcgaagacaaagttgccaacgcttggtgcgccattcacactttttacaagctcacccgctttgacactacattgttgcagcgagcatcgctcggtgccacattggcgtcaatcatcgttccatgtgctatcatcttccgccaccctcgggcctcgcttctccttccagctctatctgccgtctcctggggatttttcttgttctctttccaggtccatgagaagagtgtgctgctgcctctgctaccgatgaccctgctgcttgctggtaacggtggactgagcaaagaaacacgcgcctgggtgggctgggccaacgtgcttggctcatggaccatgtaccccctccttaagcgggatgagctccgcgttccttacatagtcatgactctgctctgggcctatcttcttggcttgcctcctacttctttcgaaacctatcgaagtcggccatcccaggaagattccaatgcccaattcgaacctagcattctcacaactcttctacacttctctttctatttggccatgattgcctggcatatcctggaggcatttgtggccccgccgcctggaaagccagatctttgggttgtcttgaatgccttgatcggagctggtgggttcggaattgcctatttgtggtgtatgtggaaactatttacccaatgtcgcgagatcagtcggcaggcgaccgaggaggaaagccagaaaaagaagcagtgattgttagcccaggtggaggctgtatgattttcagtgataccctatattgtgagattatccaaaatggagcagtaaatctgcaaattgtttcattaatatgattgagtttgatatttctttaagaggtgagacgttgtattgggaaactagtgccaaactttatattccaacatgtcacaaataaccaaacatgtcctcaaacagacgacatccggagaaaacaaaaactcccgccaatgaatgctatagtacaatgttgtatagtgatagtacagccgagggcattcggtcagagatcaagtctagaccttgaagccaaatccagccatgcaagtcttgtactgctcgatcgtggacttgcactcctgctcggggttttcggacttggagaagagcatgcagtcatcgcgagcggtcttctcgggtttgcagacgcagcagggctagaatgaaggcaggatcagtcgcttgcgactgctgggtcggcagtatcgggtcataccttgggcttttcggactgggcgggctgagcgggtgcttgctcaggggcagtggcacttttctctagaaagcattgtataagcgagggtcaaaatatttttctgacactgatatgtaggactggcgcattgcgcatgtattcggcccgactaggtggaaagaaaccttgatttaccttttgaggaaccgaatagccaggacattgtgatggatatgtaaatgtgcttggtaaatatttccagtaaacgaaagacagaaagagagtgtcaagtatgaagttgtgaaagtcgttacacgactccagggctgacaccatcggacattattaatggcaagtgctgcgcaactggtcgccatgccccgccgtatttattctttttttctgttgtcaacaaagtcgcctctccggggtcgcctcctacactacagactgtttcggttcttttctgtctatccttaggtcttgggtctcctcgtttctaggatattgtctgccattgacctcacgcttaccctattctatttctatttcttatctcattctcccacttcaacaactaccccgccatggcccctcacaaggtcttctccctcgagggcaaagtcctcaagctcgacaccgcagaggacatgaatgcacacattcagcccttgattgacaacaccgactacactgaaatccgtctcggtggaaacactcttggcattgacgcctccaagcgcctggccgaggttctgcagaaccaaaagtgcctcgaagctgcctactttgacgacatcttcaccggtcgtctcctgacggaaattcccactgctctgaactcactcctgaatgctatcctcaagatctcgaccgtccacaccgtaaatcttaacgacaatgctttcggtctaagaacccaggccccgcttatcgaattcctctcgcgccacgtacccctccgccaccttattctgaacaacaacggactcggccctgccgccggatctcaggtcgccgatgcgctgtcaaagctggctgagcgtaaggaggaagctcgcaactgtggcgaggaggtcgcgctgctagagagtgttgtctgcggacgaaaccgcttggagaacggcagtatggaggcatgggctcgtgcctacaaggcccacgcggccggcctgaaatcggttaagatgacacagaacggcatccgatcggagggtatctcccacttgttgtccgagggtctctaccacgcgcattccctggaggttctggatctgcaggacaacactttcacccatgtgggctccaccgctctgtcaaacgccttgtccggctggccgtctcttcgcgagcttggtgtcggcgactgcttgctctctgcccgtggtggtgtgaaggtggcccaggctttggcgcagaacaagaacccgaaactccagactttgcgtctgcagtacaacgagatgaaggcggaggctgtcaagagcttcacccatgcagccaagactgcgcttcccagtctccgtcgtgtcgagctcaacggaaatatcttctccgaggaggatcctcacatcgtcgacctgcgtgagcttttggaggctcgacagggagagcacggtaccgacgatgaccccgaggatacttggggtgttgatgatttggatgaactcgaggaggaggattcggaagaagaggaagaggaagaggaagaggaggacgaggaagaggccaaggctgacaaggacctaaaggatgcggaccttgccgaggaagagaaggtcgctgagagagaggataaggacgtcgatgacctggccgatgttctgggcaagacaggtatctaaacctctggagctgttggataattgtcacttctatcagtacctgccttccatcacggacggatcatggatccaataccacgttgatatcatcaatggctgagaaacccgcgccctcggcttaattggtgtcctcctggccatccatggtccctttctgtgtccacggccacacaagcttcgggtatgaggatctcgccgacgacgcttacgctttgccttcaaaagaccccgatttttatacccccaatctccaaaatggaaccctagcttgcacataattccctttgctttgatccatattctgtttgcatagccatggacccccgtgtttgcttcggaggatacacaaccatatagatggaatacatatccggacaagcaggaacattcaaatactcatatatctcaataaataaacaagtagtgtgtatacaaagttgcatataaatggaacaaaaataatttccgaaaatggaacccaaggcttggcgcagacctcggacatcgcagctcatcaaattccttttacctcgtcgcctttgacatattccctctaccatacctgtcactattggcgcttccattgccgtcgcctttccgctctttcatttctttacaggtctcatctcgcaacactgtaccgtggacgcgaccgtgaaatatccccaggtgagttccgcaaaacacccctcactacatcttgctttgcgcaatcacccgttgttcttcccggtgcaagctataacagccacatatgctgctgcatgccgttgtttccaatcttctttgtttgttttcatcgagtttccgaggccaaatgggagagagagcggacacgtgcagttgacagtaccaccttctcccgcattgtctctatggtggggtattttaagagccatgttttgtgttacctttgttgaaagcacgtgtgctctatgatctgtgatcccaacagggagacaaatgtgcctgctgtggttctggagaatgcgccaacatccggggcttctagagaccctgtgctctatatgtttgcgatgacatgctgacagataggactcatagatcgcctggaaaatcctcactcggtcctccattgaccccgtcaagcactctaatcgcgtcatccctctaccccgcacaacatggcgatggacgctaaagagatcgaagctaaggccaaagccttgggcaaggccgcgacttcgaacgagtcgccagctgtgattatcggcctcctgaaggacatccaaagcggcgtgcgggcaaccgaagacctcctccgacagacgcgcatcggaatcatcgtcaacaagttcaagcagagcaagaccccagaagtcgcgcggctctccagcgagattgtttccaagtggcggacggaggtgaacaagcagaagcaggctggttcggcagccggtcgtggttcgagcggctctccgcggccagcgcacaacggtacaggagcgtccactccagccactgcgacaccctcagacaaggcgtcgaagctgtctgtgcctccggataagcgaacatggaaggcagacggggcggatatcaatcataccgggaaccgagtgcgtgacagctgcacggggctgatgtacgatggactgtgtgtggggtcgaccgagtctcccaaggtcgttctagcacgcgctattgcggtggagatttctgcctacaagtacctggggccggagacgaaggaggaataccgtacgaagatccgtagtcttttccagaatctgaagaacaagtccaacccgaagctgcgtgtgcgcgttgtcgagggagagattactgctgagcaattcgtgcgcatgagccacgatgagctgcgctctgttgagcagcgtgaggcggacgctaagattcagaaggagaatatggacaaggctatggttgcgcagcaggaacgcagtatcagtaagagcttgcagtgcggcaagtgtggccagcgcaaggttacctacaccgaagctcagactcgtgcggctgatgaaccgatgaccctgttctgtacatgtctgcactgcggcaagtcctggcggcagtgagctcggggtgggggagcggaaatgtattattttgggggactcggtgtttctttctttctatttcccttttctctttctcggttttttctatcaagcgaaggttatgaaggccgaagctggagttctactgtgggcctttgatttatgtcttcttctacatctcgaagctcgtctgggcaaatggatgggaaacagtcgtgaactatctaccaaaatgcagatatccgaatgattgatctcaactcttattcaagtactccgtataggtgttctactatataaacacagcaacgtcatatgatgtcagtatgcactccaccgcctaaggatctcgaaccatagcttcaatcactctcccattaatcccatactatatctacactccaaggccaacaaagatccccaacatgacaacacgctcagacctcctgaaaccagtccaggccctcatagaagccctaacgaacccaaacccaacaaaccccaaccaactcctctcaaccttcacaaccctcccaaaacctctagcctacgaacacggtctcccacaactagcccccttcctaggccggcccttcaacggccaagatggggtggcaacgtacttcgagctcatctcctccctgctgggaatcaagaacatggccttcgagcccgaggagagctgggtagttgacacgagctgcatggcagtttcgctgcgcggaacggcgacgttcgtctggaaggagacgcggcaggcatgggatgagacgttcatgtaccgcattaagcttgctgttgatgggtcaagggaagggggaaggttggcggtttgtgagtatcacgtttgggcggatacgggcgctgcgtatcttgctaggtgtgaaaggttgggggatttagtgggttctgcgagtgatggtgaggggattcatctagattacgatatgaacggggaggatatagaatagggagagatatatatatcagccaacagcaaagatatagcactggtgattgtgccaatcataaggagagagtgtcattatttgagagatttttctaggtaggtccgggtggtatacatgtattctacactctttgccgttctcctcggattattctatagggctggggcagtctatccctcgaagacgctgtggttcagctcaacacccatatccttggccatattctgcatctgggcctctatgtcatcctccataccaccacccagatgcaagaactggcgcaccttggtgaaatagaagaagatatcagtgctaaacagcaccacgcggaagataaaatggcgcccgatgttgcggatcttctcggccagcggcagatccggcgactcgataagcgcccgcgaagcccagataccagtgatcttaacacggttcaccggcgagcccaggaactggttattaccttggacgatgcgcagattgcgaccgatgaagatcagctcctgcggccacttggtttcatcgccgagcatatcacggaccgccttgcgcatcccctgttgcatctcgtagtgccgctctgcacgctccgacttgctcagtccctggagaccgcgctgcgtggacttgtctccgccgctgtagggacgcatcaacgttgctgatgcgaagatgtcagcgttgttcacgccccagtccttggcaatctcgcccagcgtgcgattgtcgaaggtaaggagggctttccagaaccgcgcgtattggtgtcggaacttgggatccatgtggatgtacaggccgtggtcgatcagaaccagctctgcctttccggacggcttacggcggatgaagatgttgcctgggtgcgggtcgcaatggacgtatccccacatgaacatctgggcagagaacagatctaccatggtcgtcatgacgtccttgactgacagtcctagcccgccgttgtggttagggcctcgccagtagtcacgttttggcttggtactcggtcgattcgcagaaccctcctgcggtcggtcaagcggtgtaccgtgacagcctggacttccctggtgccagccgccgcgccagggccgcgtgatggagtctttatcccagagtcgtacgccttccacccattcagcagtcatgacgcgcctcgagctcagttcgcggaatactcgagggatatacacgcggtcgcgcagacggggttcagcggccactagcctggccatgttttccgagttatctgcttcatttacgaagtctgtttcgagcgatagtctctcactgatatagggaacaagactgttgaaagggatgtcgaacattttgctgtagacaaaggtcacaactctttttcaatgttagcacaacattctctcgcagctgcaattcggactcacttaaaggcccagagatcccatgccaattgctgtacgatctcccgcttttggaccttgatcgcaatctccgtgccatcctgcagacgagcccagtggacctgagcaacactggcactggctctggctctgcgctccatcacgcccttatcagggtctcctgtaaatgaaacaccgaatacctcctccggcgacttcccaaaatcctcacggatgaccttctcgacatccttccagtcgttctgcggcgcatcatcgaacatgcgcgagaacatctgctggaactcagggggcaggatagcagattgcatcgcaatcgcctgacccatcttcaggtagagaccgccattatgcctcaacagatgcgacaaccgctctgcggtgcgggcgtggacggcagtaacagagctagccagtggtgggtgtgctcggaagttaattttgtagtcgagggcgacgaagataccgagagaaaaggtccgggctgttcgagtcagcgatgaggcgtagaactggcgatcgatgccccaggcgacgcctgttgctagtgagacatagatgatccggcgtaaccatttaatagttcgtttgtaggtctttgcttctctgggtttccctagggagctcggtgacggcggcacgaagggttggaattggcttgagtgagcatatcggtgcgggcgccggagtgagggacggatgacggtgggccgcacagagcggaggaaggtcgcgtacgccatatgaaattgtggggaggcggatgcccaatcactgcatggtgttggcgatcaaatccagtctgatctgaggtgaaggcaaaggaatgagaaggtcaagtgtcgatttatcaagtaagccagtaagccctagaggtcggactgtcgtcatcggtagctccgcatggagtcggagtcggaggaattcagcgatgtcttattcagctacaggcacattattaattgaggtgaatcggatataactgatattaattgcatttacagcactatttaagttgaatcagggtataattcataattcatcatggtcataaacccccaaagtatcacacactttcgcataatctctcatattctgaggaatcgtggtatcccacagctcgtcactctccaagaaccgaagctgctccttacacgattcctccgaagccattggaatcaaagtaggaagatgtttgatcgaggccttgaggaaattgcgcttgaagcagttgccaaacccagccagcgtctctggatcagaacagatatgtactccgccgcccagcattggtccacagctttccttgatcttgagcgcaacgtcgtcgcccatcttcaggagagcttcttccttgtggggtacattcatgcgctgcatcaggctgcgaacggcggggacaaaggtgttgttgcgcgtccatagatcccagtgggggacggtcggctggcatccaacgtcgcagatttcactctggaatttaccgaagaggtgggctggtcggctaaccagcgcggagacgactttgaagcatgatgtgccgagggctgtaacgggagagaagagcagcacgatcacgaggaagaggcgatcgaggaaaagccgcattgtgtgagatacagaggacgagaggctaaggaagagaagaccgagttcttctgaggtcttccaattgcagttttggtgaagagaagagaagacgtgagatctgattcccccgcatttgtggagaactcggaacttcgtcatttgatgttcacaggtgtttattgcatatatcagcaaatggacttgcatgttagccatgatcctttcaggtatctctcatatcccttgctcaagccatgaaaaccgctgattctaaatctagtgactctatcgagatgcccatacatctacaagaggtggactctctcgaagccattgttatcatcgacaatgagctagatccgctgtcgcccgcagctccgaataccgtccaagtctcggggaatctgggggcaattgccatgggctcaaagcatacactgacagaccgaggagaagcctgcaaggaattgaggctggaagatgtctgctgcgcagcacatggcttgtcgattatggtggtaagatgttctgcattggactcttgaatgcgttctcattaatcctatcttatagactgccacaaaaggaaagaagaagcacgctattctcttcgatgctggtcccgaagaggaggcttgggagagaaatgtgaaacgcctgggaccaaatctctcctctgtggaagtgattcagctatcacattggcatcgagaccactccggttcgttattgaatgaaaagaagcacattcacacatactcctcggttgttctgacattcgctaggtggtcttctgcgagcaatccgcatgataaacaatgccaaacaagccgagagccgctcagagcacctagtcgtggacttgcacccagaccgaccagtctacagaggccttgctctgcccgagcatatcatttccctcgaggctgaccctacctttgaacagattggaagtgcaggaggggtggtcgacaagcggagcgagccacacaccgtccttgatgacttctttctggtctctggggagattccacgagtgacgccgtacgagacaggtctgaagaatgcagtgcgatatgaccctgatgagaatgactggttctctgacgaagtcatcatcgatgagcggtctctcatctgcaatctcaagggtatatgcagcctaaaccctcacaggcttattgggctaaaattttcttaggaaaaggacttgttgtttttactgggtgtagccacgctggcgtagtcaacacgaccaaacacgccgtcgaactcaccggtggaacggtacctgtccatgccgttgtcggtgggtttcatctcgccacaagcgacgcggatcaaatccaaaacacagtagccgatctcaaacggctcgatcccgccgtgctgatgcccggtcattgttcgggctggcgggcgaagtttgctatcgagaaacacatgcccgggtcattggtgccctgcactgtcggctcgagaatcacattctgattccccttgagacggtttcatctgaaactctaatacccattcaaccggttcctgtaggctcgttttccacgtggacgcagggtcttgatgcgaaactgcatggcatgggttgctcgagcaacgagtttcgtcaaggggttatctcggtctcagctcggcataatttgttctgttgacggattccgattactgacataactctattcccttgctgcatttccttgcgatcggaagaatgcggatggatgtagttgactgtttctagactttgattacggagtagtaagcgtgacatgttaggcatacagtgaaggcattgatacttctggctgatttgtagcggcggtttatgatagttgaataatatacgtcggaaatgatcaattcactctggagattctccatcacataaaacattgagaagttcggagctgcataagatttgtagttgaatcgaacctgatatatatttccatgtatccaacgacaattgtatgctagcaacatctatttcctctaagtttatgagacgcggatgtttaaccttgctctaatgatctataatatcttgcatctactgaagaactttcaatatatatgttctacaattaaacaaggcagggtagatgtaacttccatccactacgttatcaagtctccaagagatcagatcatcaaacatcaactattccatgcacgttagttctacgcccacgtcagataagccaaaaagtacctcactacccatccacagcatacggacaggatacagtgtaaccaccagcaacgacaccaagaccacccgacgtcagctggactaatcctccaccgctccgtcgtgcattgttctacagccaagatcccttggtagtaaatatctaccgaatccgtgagatacagcatccaaatatcagcaaaacagtcagtttccgtcttggccgacgaaaatccctcagcggcagagtaagtagtaactagtatagttatcgatcaacatgaacaaatctaaatgcgcccctgacagcgccatgccatgccacgccacgcccctcacagacaacacctccgataagagcacgtcctaagctgtatatctcacattgctacctactgctacctacatactcacgtgcattgctccgttcgtacctagcacggagtacggagcaccccgtacgaagtacatacaagtacaagcatgcacactgcccccgccaagacgcaaccacaacaagcattaccaacaaccacccttgcgctcgtcgactcccctctcctctccaccccgccccacgaatccgatcacggtcgcccgaatcatgacctcacgccgatagaaaaaagggggctggtcagaggccgaatgcctgccaaggcgataatgcgggaggaagggatgcacggcctggcttggcgtcggtggacaggtacgagattagggcgatcagcagatcaagggagggaattttctatgtagattgtctttgatgagccgggggaagatacttgacatcattgaatgactttatcgcgttgtgtgcggagtatagtcggtagtgtagatacgtgccaagagtatatttggatatcgtcggtctttgttctccgagatcgagtgtgggggagacagggataggacgcaatactcaggataattgtgggttgatggcttcggtcgctggtttatcttctctttggggtatctgaatacatgcccaggtgtgatctatactatacaggatccgtatacttccttgggtaggtcaccaagactccgattcatagcgaactatcgatatccaagacaatgagaacaggacgcaagtcgatcccccaccccgttctgacctcagactctcataaataggcaatgcccagcgtccatactacctagccaagaaaccctagtgaaacagagccgtgaaactcgaacataatcgcgcctctccttctgttatcggatcttggcttgtgcctgtctatcgtcgatcatgaagtttaatcccacattagccatcctaatcgcgacgaatgctattgaacagtaacgctgcacgcaggcagcatgtcgatcccctcgcatcccccacgaatctatccctgtcttgcttggcatgcctagacaaggtatcccgggacaagctcgcagtacgcagagggtatacggtacctgtaagacggggaaaaggataacaaaggatactgaaacggtgtctgggctattttgtgcttgactgcgccccctggatttaaaggtagttacagttactggctgatactgataatcggcaatggatggccggggagtttaacggtggctatgcagatgccgacggaggtgtcctgcaaagagagatattccgtagcctagcaggcagtctcacaccgtccttctatgaatagtaacagagaagcaaagcaggcggcaatggcgacaccatccaattcgtctcatagcctccgatctggagaaaattgggatcaaccaggtatcgtgaacaccgccgatcactcgcccgagagacagtgacagtgacagtgacagtgacagccagcccgagacgcaatactgtaacgttaatctttctgtagcagtctgtgtttcaacattatacaacacagccaagaatatcaatacgtcacatacaattattgaccatatacatcgctacagcacggggagaggagcgtgtgcattattattgtggactcgactgttttcccgcagggtagttcgggccacctaccaaaacgcagggagagcaaatctacgaactgggtgtattaccccggagctatactaaagaaggcaataattaggtctgttagagtcatacctatgtcgtagtaacatgcatactttccttgcgtcacaggggaaagggaaaaacaaagcgactgtctttcactgattagttttttcctaatccggaaagacaacacacacctccccgacaccggactcagggcgcgtcgcgctaatggccagcaatactccggagtagtaaatagtgatatgcaaagttcccttgcgaccagtagcaagcgcggaaaatatatcactttgcatgatctccgaaaggcgacttgccagttgtgaggttcgcgtcgagggagtgtggggtgttttgttctcctgtcgatcgctgccggatggggaggacggaggggactctcttagcttgcggtctggcttggaggggaatgatttggtcgattatggggatctagactatggtgattatgtttgctcgacgtggcgtgagtcgtcttatgccgtggatggatggcctgtgtgtttatttattgcttgtttgggtatcgtgcgatagcgacgaggacggagagggtatgtcatcatagctgtcggattcgtgaaaggcttaggggaggtgactccgtgatcacactatcacccggtatcgtatgtttctgtgtgcgatctccacagtccagggccggacttgcggtttttccgacgtgggattccgacgaagagctgtctggccaggatattgaccactgttggattttgctttctcatcggtgcgtagggggcgtgtcggtacctgactactaggatctgatcgacgcagggttgtatgcagccaagagaaatgtagcattagatctcaatataatacaccatattatccgatgcacacgatctagaaatgaactgtgtacacaattcacatgaggctgactggataattctcccactattacctggtggcgcgtaatggattcatccatccgaagtaacagaagaaattacagccctgccaagaactgcacaaagaccctggaactgcgaaccagatgaagcaagcgttcaaagttggcaatgagcaattaaaatccgatatgtaaccatagtcgacgacgcctcacgcccacacaacgctcttcccaaaccgaaatcagacgtgccgagttcccgcgtgccgcgtcggagtttcgacacgggatgcccgactggccgagtctacaccttacaaacgatcatagccaagaccgagaggggaccgacataatgggaaggcgatggtccaatcgtggggcgggaacgagaaacctcaatattcgggggattgtctgcatgaggtaaggcaaatggacaacgccgggcacagacacgcggggctgagggaataatgtacattgtacggagtacggagtacacatagtatgtgctctattgtacgcacggaggacaggtattaattccatggggttgaataatatggagtccaggacggagtatacatcacctacccccgtagcaaaagaagcagcggtgatagtcgttttccaagctctgaccatcctacgccctgggaaaaggaaagacataacgtcatacgtcatacacgattagccgccgagtctgagattaggccaatatcccacgccgacatttttatattgcgattgcgtctaggctgtctaatttccgagcagcaacagcgcatttctcgtttcaaattgcttggagctctcctgcaggtgcgggaaccatatcacgctagaccagaacgggaatcggggtgaggtacgtgcacggtactcccgaggttcggtcttgggcgtattgggggagtgtttttttcgtttcatttcattttccgtgtttttttcatttcggcctttgttttctccatgggtagccgatttctggggtgagcaaatctgggatagcttggcgaacagttagggtagtacttttggtcttggtccttatgcaacatcagcaattcattacgagaatacggagcgctgtgctgtcaaaggacggacctcgcgcacaggcattgaatcccgttctccggagtgactagtcccaaggatgagagtaacaagccttgtcggtgtgaataaaggagctacggagtagaaagaaaatgcctcacgatctgagatcggcaagaaaaccgcggagacctttgtccgtacaagctacgcgacgctagcctccttagtggtaagctatactccgtaatcaaggaacgatgtggcaggcgggcgatcattcagtgggccgcgagggtttgattcagatgagagcttcctgcaagcgtatttcgcgcccgctgattgctggacggagctctggtccccatcgcactattcgcgctactgtaggtacacggctgcgaggcgaaagccaagccggtgctaggagaggtggtcgataccgggccagtagacgcagatgaaaggggatgccaatggaaatcatgtggattcagggatctgggttcgatgatggagggaaattaagaattaagttgtgtgtccccgtcaattcgacatgaccctttcacatgttgactaccgagtagttaacgagtgcgatagactttgctttagggctattattcaatacggcatgtccaagctgaaggacggtcccccgtatttttcatttcagtggaaaattcaccccggtaattacctgactcagcactccctaacgatcatgattggtgggggactggggtaatctcgctactcgggcgttccccgaatcagaaatgcgcttttatggattttcaatggggtatagaagagcatcgggttagtctcaacacaaagcgaaagcggcatgataagaagtcatgacgtgatactgttattcttatcatccatgggctgtcaattcgcattgtgccgacatccgtctattgacaaggataaagcagaggcaagggagggaaaaaggtaaaacgaaaaaaaaagaaaaaaaagaaaaaccacctgcagcaaacctgcattgcatccatgggacggtgacgctcgaaggaagaggaagccttctagaagccatccagaacaccctaaatcgataaccacacgcacctcggatccactccgagaaatgtccaaatggagatgatcaccgactcggcaccgaaacctctctagctcgatccctctagggccagcctgcagtttactctgcacgcagcagttttgatatcggcctcatgcctcaccgtcctttacgacttacgatatccagcaattgatcttcaatttctctctttcgttagtacgcccggttcggtccggcgtgtggcaatcataatcatctgaatgcgaatggacatttgcggcattttgttgcatgacgcaggacaagacacatcacgatcggaaaaacgagaaaaaaagcccgtgcttctcgccgtcagcacgctgaattgatctattgatctccagaccaagcctgcaagcgagacggcagcagcggcgcgatcgcccgacaactgcgaggaatctccgatgtctttgaaggttggtttccgggaatataccttcactaactacatatcgggcttgagacggtggcggcgtcgatgtagagctcatatccgaccgggaagaggtgattcgccacgggcgcatatagatcaatttttatatggagttctccgtacttcgtctccgtacaatcgttattcttggggtgtgtagcttccgttccggtgggatgggcgatcgtggaacgtccatggatgtttcccagcctcccaatatgggcataccgtgaatccccgattacgtctgtgatataattggaactgggtattgggtgcatcatctgtacggagtagcgtgcaaagtacggtactccaggtacaaagtacagtaaagaatagtagaattgactgtcccaagatatattgatatctactatactctcgtacctacggctacggatctcgtcccacaccctcatccatggctcgccgtgggggaaaaaagcagaaaagtcgaaatttgccaaaatcccaattctcgatgcttcggttgccccattcgaggcattttcgcatgttcccattgattgggatacacagctctccactatgcgcctcggttttggggatttggtctgaacggtcctggacccgacagatttttttgaatcagaacaatggcccgatattctggtcctgatccatgaaagaaaaaattcggccagtgacctcggcggcgttgagaacagtcccttctcaggatcgtgcactgctggccttggctgacgtggattttcgaaaggctaaacggcgagaatcccccggaatgatcgcaactcaattggccttttttttccttttttttccttttcccgtttccttttgcgtttttccttcctttctcgcacggggctgcagggggacgaagcgcagactgtccagcgaataggggcttgtagcgggattgccagaactccactggcttcctaaaggagtttggcccatgagctatctgtctctggagctgttcttcgaccgtcgagtatggaggagatgagacaggggctacagagtgacgatagcgggctacggtgaacgggattgtcttgctctctatcttttgcgggataatcaatagctcccacggaggacagttccagaatggaaggtgatcttttctccgatagattatattaccatggcgaggatatggccagaccggggagctccataatttattcgccctttacatgtccgcaattggttcgcgttgtgtcggttcgccttccgcgtaaagcgccgggcaccgttgatgggaagtatacaagacgggaccgacaggattcattatcgcaagccatcgatcgacgtatcgtctctacggatattgtacgatgttcgggagacgagaacgagaacagaaattgtctagatcgcggagactcgcgataatatatcgtttcccgttacctatctccaacggcgcgtgcacgatttcaaccccagccctgaggagattggagattggagatggagatagatggagattggtcttctggggaagacttgccaagggcacattcgccggaaagccggggcgagtgcgggtgcatcaaaagtatgggaaaccagtgactgtacagaatatgtacagactccgtcctgggctgctccatcctaactatcatatacatttcctacatcctgattcgaaaccctgtctccatccaatcgcagtcagccttattctattgtatgcaccgcgaagcttgacggtgtcgatggagggtctgatcgtggaccatctccagtaatatacatccgatgacccctgctatgtacatatgctttcgaggatttacccgcactcgggcaacccgcatttgccatcgtgaactaggtttgtgattgaattttccgttttggccatgtacacaaggcgatcaatgtatgtatgtgctggccggataataatagtagtctccgattgaagcgacgacggacggagtatagtgaactttatcgatgccgtcttttctcgattgagatctacaatatatcacattatacgagcaaacaagattgccactgagataccttgaagcattccgctgaactccgtataaacacccatgttaagagtcagtgcttgggaacagcgtcggcgatcaacaatgatgaaatcatcggccggcgtctgcacacggtgattcgatcaaagccttagtgtagctgttagtgggcctacatggtactgctggccaatccggagcaccgaattaaatgccgcttctggggacgctctccacgaggccagggggaaagagagggcgacgatcgaccgtggtcagagggacgaacgaggcagctgcagcgagggcagtggcagtaggacacggcagtgcgtgctgataccagcagctgaaaaagaaggcccggggaagttcgacattagctaattgatgacataatggtaaggtacagcgcaggcgtaatccgtgggtaagaaacgggtaattttcaacatgcttcaacctcacaacattggcatatccagatctgtcaaccgtttccggaccccttgctatgttaaaatcccatgcgattttggcgtcatcacagtcacagtggcattttttcgttaccttgtgcgtttagtgtttacgggcgaaagccggactcggtcggcaagtcactgaagtatatacatatgtcgctagccctgacatgggcaaatgaaggcatatccgtatcaatagactatcttgggactatctcgggctatgtcgctaaatagagaaacattctcctgcaagggcattcctgctctattcctttttgccaaggccgtgaattctccgtgaaaacacacctaacctgcgcggtatcagaactggtcgtagtgtgtcttttttgctgctatgcttggggtcgcggggcacaccccagacacaaaaatcgcgcatagtgtcaggacccggggcagagacttgcgtaaaattgtgtaccgattttatacgaaagtgatgtctgtggacgccaactcggcagcgcggtgccggtagcagagacctctagagtgagagtcgtatcggtatcgcgtttttgcattgttttgatgctaatccgaaggcggttcctgacccactttctcgaccgcggctgcaatgtgactggctgcagctggctttagctggctttccggtaccaggtttcttggtagggcaaggggtaaatcttggtatcgaccgagattcattacagggctaaccctaaacgggcaggaaaagtggaaagaaaacagaaaaaagtctaattattcccaaaagaatggcccatgagcaggtcgagcagtacctagcttatagcttccccagcaaccaaatccacaggtatctctcccctcaaattgacaaacgcgggatttcgtgcaaatacctctctccccatttattttttatttcttttattttttaattcccaattttgcaaattcaattcccaaattcttttttctttttattttttttattttttaatttccctcactcttttctctcattatccacctacccactccggttttgacccccccgtaatccattataaaacagcccttccttcacccatctcattttcttcctttcctctctttacataggatctattccgactctgtcatatcgccattccgttgttctttctcatatcgttgggttccaaggctgtgtgagccgaaagcaacaacaatggcggagcggagaatttcctatgctgttgatgtcgaaaatggtggtgagcatcgcacccgtgaggctgatgatggcaatctcgacgagtactctgctttgaaccgatacatctccactgcccaaaacaaccgtcgtggctcgacctccagcgccgctggtaagagcggcgatgactccgagaagaagaagccctggtggaagttcggtggcaaggtcgtgggaggtgtcgaggaaggtttcgttacccccgatgactggctcgagaccgacctgcgcgctggtctcagcagcagcgacatcgagcctcgtcgcaagaagatcggctggaacgagctggtgactgagaagaccaacatcttccttcagttcctgggttacttccaaggtcctattctttatggtaagtgacctggacttccgtcttcaggacgcgtttccagccaatcagcccactaacgccttgctctcccacagttatggaacttgctgtctgtctcgctgccggtctgcgtgactggatcgatctcggtgttatctgtggtattcttttgcttaacgctctcgtcggttggtaccaggagaagcaggctgccgatgtcgtggcttctctgaagggtgatattgctatgcgtgctctcgttatccgtgacggccatgaggaggagattctcgctcgtgagctcgttgctggtgatattgttatcgtcgaggagggtaccgttatccctgccgatgtccgcctgatctgtgactacaccaagcccgagatgttcgagacctacaaggaatacctcgccaacaccaactccgacgacctcaaggagaagcacggtgacgatgaggatgatgatattgagacccaccagggtccctccctcattgcttgtgatcagtccgctatcactggtgaatccctcgctgtcgacaagtacatggccgatgtctgttactacaccaccggttgcaagcgcggcaaggcctacggtattgtcactgctactgctcgtcactccttcgtcggtaagaccgccgccctggtccagggtgccaacgacactggtcacttcaaggctgtcatggacaacatcggtaccactttgctcgttctcgtcatgttctggattctcgccgcctggattggtggtttcttccgtcacttgaagattgctacccccgaggacaacgacaacaacctgctccactacactttgattctcctgattatcggtgtccccgtcggtctccccgttgttaccaccaccaccctcgctgtcggtgccgcctacctcgccgagcagaaggctattgtccagaagctcactgctatcgagtccctcgctggtgtcgatattctctgctctgacaagaccggtactctcactgccaaccagctttccatccgtgagccctacgtctccgagggtgtcgatgtcaactggatgatggccgtcgccgctattgcctcttcccacaacatcaagaacctcgaccccattgataaggttaccgtcctcactctccgccgttaccccaaggcccgtgagatcctctcccgcaactggatcaccgagaagtacactcccttcgaccccgtctccaagcgtatcaccactatctgtacttgcgatggtgtccgttacgtttgcgccaagggtgccccccgtgctattctcgccatgtccgactgctcccccgaggaggccaagctctaccgtgagaaggtcaccgagttcgcccgccgtggtttccgttcccttggtgtcgccgtccagaaggagggtgagccctggcagcttctgggcatgtaccccatgttcgatcccccccgtgaggataccgcccacactatcgctgaggcccaggtcctcggtctctccgttaagatgcttactggtgacgctatctccatcgccaaggagacttgcaagatgcttgccctcggtaccaaggtttacaactctgagcgtctgatccacggtggtctcgctggttccgcccagcacgaccttgttgagaaggctgatggtttcgctgaggtgttccccgagcacaagtaccaggtcgtcgagatgttgcagcagcgtggtcacttgattgccatgactggtgacggtgttaacgatgctccctccctcaagaaggccgattgtggtattgccgtcgaaggttccactgaggctgcccaggctgccgccgatattgtcttcctcgcccccggtctctccaccatcgtcgatgctatcaagttggcccgccagattttccagcgtatgaaggcttacatccagtaccgtatcgctctgtgtctccacctcgagatctacctcgttacctccatgatcatcatcaacgagactgtcgactcctccctggttgtcttcatcgccctgttcgctgatcttgccaccattgccgttgcttacgataacgctcacttcgaggcccgccccgtcgagtggcagttgcccaagatctgggttatctccgttgttcttggattcctcctcgctgccgctacctggatcatccgtggtaccctcttcctcaagaacggtggtatcatccagaacttcggttctccccaggaaattctcttcctcgagatcgccctcactgagaactggctcatcttcgttacccgtggtgctaagacatggccctcgtggcagttggttattgccatcttcatcgtcgatgtcctctccaccttgttctgtgtcttcggctggctcgcacccgactggaagcagacctcccccgtcgatgccggcggtcctggcttctcccacaacaacgatgtcgacattgtcaccgtcgttgtcatctggggctactccatcggtgtgactatcatcatcgccgttgtgtactacctcctgaccatcgttcccgctcttgacaaccttggccgcaagacccgctccaaggccgacaccaagatcgagaacatgatcgcccacctttccaagcttgccatcgagatggagcgcgacgcggaaggaaagactcgttacaccatcggtgctcgcgccgaggagatcgaggacaacgagtaaacgctcgtcccttagcttttttgcaactcgttactgattcgaggtctaatttctctttttatctccctgcgattacccgcaaattttgccgtgccacctaattgaacatgcatgccgtgggagtcaagaaggtcgagttccgacttttttcgcttccttttacccgtattatagactttgtgtgtttcatttacccccctggctgtggtttgctttcgagttgctagagtcatgtttttattctctacgtgtatgtatgtcgttaatagtggcacttagtcaatctaaagggattctaatcatttctgttctactgtaatctcgtaacctttcgtctgatctttttttgttatgctttcgtctgatcttgtcgcctattgtttgtctttggtctcgactctcccagtctcataggtggaagtaattctccgttccccatattttccccggatgaattcctggagacaagcttcaccgtctctttgcatcatgcatgaagtattgagaagtaccacaaacactcgacttcctactttcaccggattctcacctatcctggcactagtctcgctcaatatgaatctctaattttccgtctcatgcaactagctacgcatctataaactccactccaaatgccttattagaacaaccgtagatcgtgcccatcggaagtaaacaatcacccacacaaccacgatgctcccatacatcctctccctactgtgtctcctcctccacacccaaggagccaccactacccccatccaccccatcaccagacaaacctgccaatccaccggccactgtccaccaggaaccctaatcgtcagccgaacccccaaccacaaaaacaccacgcacccaaccctccaatccgccataaactccctccccaacgacaacaccccacaaacaatcctcctcctagcaggcagctacatcgaacaagtaaacataacccgcccaggcccactaaccctcctgggcgaaacaagcaaccccagagacgcatcccgcaaccgcgtgcgcataacctgggccgccgccaacagcgacagcaccggcgccgtcgacaacgtcttctccagcgtgctggtcgtagcgcccacgctcgaggccagcctcacgggctcgggcccgacggggtatcccgtgccggcggacacgccgttcgggaatacggatttccgcgtgtataatgttgactttgagaatacttgggcggagtactctgatgggccggcgcatgcgttgagtcttagtcgggctaatggggggttttattactgtgggttttattcgtatcaggatacggtgcgttttagcttctttctaactgtgcttttggtcttattgttgagattattattcgttattcgttgggagtgcactattctcacaccaacactaacccccacaggtctacataggcaaactaggcaacgcctacttctaccaaagcatcctagccggccaaaccgacttcctctacggcttcggcacagcctggattcaatccagcgcgctccagctgcgcggctgcggcggcggcataaccgcctggaagggcacgaacaccacaaccccgaacaagtacggcgtgtacatagtcgactcgagcgtgcgcgccgcgaatgcctccgtagcgactgatatccagggcgcgtgtgcgctcggccggccgtggaatagccagcaccggtcgatctttgcgtgctgttatgaggacggcagtgttgatccgcgcgggtatgttgattgggttgttggtggtgttgggcgcttcgaggagggcgttacgcttatggcggagtatcgggattttgggcctggggttaatgtgactggacgggttgaggggggtgttacttctgttcttggattggggggttgggaggcgtataatactccgctgaaggtttttggggatgtggagtgggttgattggggggttgttagggggactgattgagttcgatgggtcttgttggtactagtgagtagtgagattcctgttaaacagtgcttgcttcacttctacatcctaatcgtaccaggctcctggcgcatctccccaatagccttcccctccgacgtcccataagtatcagcatacctccccgccatccactcgtgaacggtaatcgggggatatttaccaccctctgatgtacttgtatctgtatcctcacacccaggaagacaccggatagtatagtttggattccccgagaaaaagaacggaacactaaagcgctccttgccactggtattaatcacgcggtgcagattcgacaagtaccgatcattcgtccagcgcatcatcatattccccagattgacaacatacgccccagggaccggggtgacatcgacccattcagacgagaggttattccagacctgcagcccgcccgtcccatcctgcatgagcatggtgatagcgccgaaatcggtatgcgcgccgattcctagagtcgacttgttagtccgtattgcttgacgaattcacatcctaacacaagttcactaacctctctccagatccgacgcatcatcctcctggggcggataccgaagcagtctaagaatagagacggggtgatcacagaaatcaccaaaagcatgctcgtctagaccgagcgtgcgcgcgagaacttgcatgatggctacagccagctcgatcatcgcgtcgtggtactggtccatgacgcggcgaaagccttgaacgtcggtcacttcggagggatacttattcggtccgtggccgaagcggcgctggacgacgtatgggtcgtttagggggaggtctttgccgagatagaagccttctttgaggtcgccttttgtgcgtttttcgaagttttgggagcggaggcgctcgtagccgcggttgaagccgccgatggctgggggtttagtttctactgccatttgatggagttgggagaggctgtattaccttggttgtatttctcttttgtttctaaggggaggttgaagaattcgtttgagtgttgtaggactgcggcttggagttcggttgggatggcgtggttgattagctggaagaagccgaattgttcgcatgcttgttggatttggtggatgaggtcttctttggttgagtcgttggcgtagaaggctattgaggggttaggtattctcggcatataggatgctaagggcacttattacgggcgaaatcaatgattgggggttcgttaggcttcatcttggaggtagttaggtgtaggaagtgagactttaaagtcttttatagctgtttatacctgatcttggtcttatatcttcgaaatgcggggaattcgttatctcttcactcaattttgtacatgtactttacctatctgtcggaaatccccgctcctgtgcaatgtctgaagggatttttatggctcgggatggtggaaaactgtcggagaagggtctcacagccgctacgtatgtttagtctgcatggttgacctgatcgaattgctagagagatggagaagataagacaaaaaactgtacggtacatgcatgtgtagtacaataaaactcaagggtccgaaagaaccccgagagggaacaatgggtatcatattcgctctaatcaaatgctaaaaatgcacgggcttccactcctgtccgggataggacgtgggggacatgacgatctcctcactggagcggtctgcggtgatggcaagctctactggctgaggtgggttgttgactacacggacccggtcctcactgcgatgaggatgcgcggatatcgcgtctgagatggcgatgttgcgggatgcatggttgtccaaggccgggaataccgagtatgtaaccgctggctttcgggattgaatgctgagccgaggagccaggctttgttggttggaattgcctggtaattcgtgttgttgcccgtgttttgacgcctcggatatatccccgtatagttcgtgtcgaaggggccccccatgaatgtgctccttgtcttcctcatcgtcccgctgctcttggttttggtcttgggtgccttgcttgtgctgctcctctccctgcagttgatgtatttggtggtctggtaactcctccaacggtgactgtggacgtggaactctatcctcgtagaatgacctgggagacggtgaccgggaatgacttgggagaggcgggccgagtgtgccagcagggtgagaccccggggattcattcatggatttaggttgaaactgcgagtaaaaccgactggtcgccagagaggatgacaagctgggtgggcgtggagtcggcaaaggcttttggtcaaatggattgctgaggaccggtggtccatcctgtgtagcgagactagtattcacatttccacttggcgacgggtgcgtcggcgagtatttgttcttcagctgctccgacatggttcttgtgtggtctctcgattttctctcagggtcgtgggagtcttgccggccaaatagtccctgtttaagtcagaaaaaggaaacaaaagaactgtccaagttgacatacgctaattctgctgaaccgtttccgctgacctcccgggggcgcctgaggcccttgcggttgaataccagagaggagatctcccacagaagcgcgtcgtcgtctcccaaagtccttcagttttccaatagtagatcccccattctctgcaggagatcccgatcttgaagcttgtgaaagaccgttagcaggtgtggacgggcgagtgcctttgctattggcgctgcgctttccgaagctaccaaagctcagcatactgcttcggtttgccggcgagtatctgacttcatttctcaaggggctttgcacatctggagcagatggaggtgggccgttgatagattttcttttggcttcgagaacctcagcagaacttgcgaaccccgacgaatagaaaggtatgaaagaccttctcttcacttgaacagatggctggtcatccacagaatgctcaaccggtttataccggggttctggggttacctcgtttgctgcatcttgcaaaggagaagggggatccctgtcaagttcttcgtcagatgtacgtccggcttgctcgtcagctccgagtgtggagacggagggatggcgtctataatcctggctaggtgcaagcccattatcattgtccttgggaggaggtggaggaggttgaggactttcatcaagcactggacggatcgacggggtaataatctccggtgtggacttgcttggctgatgcccccggcggttcgtaaacgggaaaggtacgtgaaaaggctcattgggaatgactggcaaacgattttctacgactggggctttgttcgacagcacggattgattgccagttgggatctctcctggttgcggtattggctgtgtgaattgacgtttcccgccatttacctggctaaatgcattcaacgacatcggtgtacttgccgcccttcggtggtgaggatctgtaggcgaaagaccaagcgcggctatcatctcctgctctaactctccagtaaaggcagacttccccggaacttcaggtctaggagggacaccgctggaagaggacacttgcttcggttgcacagctgtctcgctaacacggttgtacgacgggtagttttcccccgacttggtcgctttgacaggttcgctggaattgtgttcatcctgtcgatctagacagaaactgacccccggtggatcaggatcagagctgagctcggttcgctcagatttgaacatgggtagactgccaatggcgacagaattccgcagagaagagttaccagacacctcacccggccttgaagggaaggataagtgaaagctgcggcgggaagcacttggagttgactgaacctacaacattaccaacatcagaatgtaaacaaacaggggcggaatgttagattgtagcaaggaaagacgcatcaatcgtgtctcattctagagctcaatgcgaaaggtgcgcggaattacatcgtggtatccagaaaatgaagcagcgcagcgatatcgaaagggaaacattaaagcgacggcctccaccgtgcttacccaaataaacgactcgctcaaacgaaaaaaaaaaaaaaatcaggcatctaccttctcagaactgccactgggtcggaacctgcttctgcccttagcaaacagccccttggctgctccggtagccttgccactaaacgctcccgcagtatgaaggagctcctttcctttctccccgactttctccttgttcatcacggtacccaggtggcctgacggacgtcggatatgggtgacactagttggagcaccgtcattcaaggaaccgagacccccaagagcacctagcttagggaatctgatgcgcgaagggtctggcacggtaggggagagattctggctctgttggaccacgtcggcatactctgggtgatcatgaaccataaactctagccaatgattcaaaccagtatcaacggtggcgaactggtcgcgggtgtgttcgaaagacttgatacgctggttgatagatgtgataccgatgatttcacggaaacccaaaagtttggattcatcaaaggatgagctgccggcgttagaagagatatggaggggcggaggtggcgtagctcctggccccatgatttgctccggtggtgtaatgttctgcggaacaggtggaacaatcgaaagtcgaggcctttctacagcacgctgagtagttccttcttcatcagaagcaagcgggtcgtgcggcacatccgacaagaagacgggctcctcacttatcggctcaggctcttgcatagataacgatgtgtctaaaggaggaggcgacgaatagccgccgggcatttgaggcgcctgtatttctgccgaatcagaggattcccacgaaaaccgtctttctaatttgggcttctttagcggatcaacgttcgtgccatccgcgccttgactggtcgcataagggtcttgagacaccgaaggagccaggttagtccagtctggctggctttcggaaaacaactcagcgggtgcctgcgattgaggttggttgctgggcgggtcctccgagggggtggcttcccgacttaatgatcggataatctcctccctcaagcgatcattgtcggtattctggggcgattcctcggctcccatgatggtggggatttcgccatggaaggcgtcagagcccgatgcgcttccgaatttgagaggggcaggcatatcctgcccattgttcgagtatgattgcatcagtgcgttcggaggagagattccctcatcagatgattctggtgagagattctggagtagaggaatggaggataattctgcacggcccgccgttggggtgtcctggtctgtgaattggggcttcctcgaaggactgttgtctgaactaggaaggctcaggtcccggcgatgacctaggtttaacgctggaaccgcattggcagttgccttcggggagtttgactcattcggttcctcgagaatggtaggtgttctttcatcagtcatagtacgactgcccatgatagggctgatcgtcgaagtgccatcgctgttcgaccgtgtgaaactagtggcggtagattgtggagtttctgggacatcaaaggcctgattcactaccgatcggaatcccgtggaggagttgtgatgcaaatagggctcctgagatgcagagctatccttcggcgggttggagtctgcaccacccaagaaatcggtaccaaagctagatacgcgcttgacttccggtagacccaaatcgagcttttgttgatctgtttgaggtggaactccaaacccgtcaggcttgggatcattgctaccagtgataggatactgctgtgcggctttctcctcgcgcatgcgtttatagaggtcggccggccttacaaagggcagggccttttggtctcctccactaagattcctacctttgttatcagccaagtgcgactcgccagctccgagtccgatgctagacaaacgcctcgaggacaactcggatgagctgccagtgttgcgggtgacatagggcggccgatgtactacaggaggcgcctcctcctcttcatcgtcgtcgtcgtcgctaccccagtcacctccatcataagaatattgcttcgcttccacccagcgttttgttttggagcggttcacgtttgtttggaatgagatcggggttccgctgcctgacgagagcggactgagcacagttggcggggaagggctaaagcaggtcttagtatttgagaactagatatgcgactagatttggataaatggtcttacagttttggggctccatggccctgcgattgggttgggtctgccattagggaacaggatcaaggtactgagtcgcgcgcgatcaccagcatcgactgttgcctggtggtctctgataattttgcgcaagagaaaattgtaagtgttagagaagaatgtgagcagcaacgttctcttaatgatgtgtatggggagagaaaggtggcgatttggcccaagttgggcaagcaccaatcaaataggttgggacaattggatgaaacaagatgtacaagaatgacgtgtatccacagcggaacacaagatcaagccagctatatcaagaagaatagaatagcattagtatcatgaaacgagctaagttgtatattccccctgatctaacgacgtcaaagggctgaattcgggtggcggtgcggggcttatgtaacgcgtttcggattccaaggtttagttacgtggacgaacggggctcattgcgacaagtcgaccttgtggacctcgttggccttgaccctccatcttcttacttgactgtacggagtatatccggtctgctttgttcctggattcaagtcacgttgtacctcggagctctttacctgcaaccggacacgtcttcacctcgccccccttatcgattgcagatagatcacatttcagttccaaaaccgagttcggcctttgtcgacattaatttacatttgcttctcaatactggtgcttcttgaaagactatagctactagtctcccacgcttcacatcttccacatcgcacaatgaccggcccgtcgatacaagacaggaccagcgagttcagcgcgatcttgggccacgcccagaagcgcctggggacatcgaaagttggttcgcagcgccaggcattgttgactgatgcgcaaaggcgacaagccaatgtgtcgccccaaggtcccgtacaggaggcgaaggcggcaaggtcggagttcgcacggcgggcgcgagatatcggaagggggataactggaacaatggcaaaattgcagcgattggctgaatgtaagtctggtcacgtcgctcaaaatgccagcaatctaacgaggaaacagtggcgaagcggaaaacactcttcgacgaccgacctgtcgagatctccgaattgacatacgtgattaagcaagaccttgccgctttaaaccaaaacattgcctcgctgcaggcgctcacccaagcgcaacaccccaaatcgaatcgctcgaagacagaccaggagggagaacacaatgacaatgtgagtgaggcatgggaaaggccgcgcacggacaattcgctgattacccatttcaggttgttgttatgctgcagggaaagctggccgatgtaggcgctagtttcaaagaggtactggaagtccgcacgaagaatattcaagcatcccgaactcgaaccgagaacttcgtttcctcggtatcatccaaatcacacagcgccctcgacgcacagcgctcagactcgcctttgtataacaccgcgggacgacggacacctcagcccggatatcaaggcaactcctccgaccttttgaccctcgagccctcaaacccttcgccattggggcgtccgtccttccaatcagatcaacaactgatggtaatggaagaaggagaatcgagtaatacatatgttcaagctcgaggcgaagccatcgaagccattgagcgaactatcagcgaattgggtggcatttttggtcagctggcgcagatggttagcgaacagtcagaaatgattcaacgcatagatgccaataccgaagatgtggtcgacaacgtccagggagcacagagagaactaatgaagtattggacgcgtgtctccggcaatcgctggctcattgccaaaatgtttggtattctgatggtatgttcactcaataaatttcttgtctgctcatactaatgaccgttctagattttcttccttctctgggtcctgatttcgtgatagacatgatatctgcccttttttcatgctgtactataatatctggcccgtgtgtttcgacagatcatggcctttctgcatatctgcactcgctgagcattttcatgtcttttactgcctggctagactctgggatgtctaattcatcacgctctttatcttcgtttctacttttttctgtgccctgtgctctttgttgcttgggactgtgtcctcatgagccacacgcgtaaatacacctcaagtactatttgaattcaatgaaccgagatcatgcgataaccatgaatcacttctacattttgaagccagtattcattctatttatatcacgcatcaaactgcgtcatcacattccacagttccgactccgcccaccctaacgagggctgattatcgaacaattcccacacaagactgtcatcccatccccccacagacggtggcgcagtgagttctccagtggaatctgcacccccaagactgacaaaagccggagggttattgtcagcacggccaaatatatctgtgtaggacgcaatattgccctcggtgtttccagctgtgttcgcttcagggagtgcagcttttggctgttctaagcgggaaggttcggggttccctttgaccaaaggtgcacacaggtccaaaaatttggagaatagcttgtacagcttgccgatcgaggcattcgcctctgcgaattgatgtaggtctccggtgatgtttttgatcatattgaagtctttctcgtttgatgttgcgatcacattgcagaacaggacaaagaacggtgctagaggaaatagcagcattgtcctgttaaagggtcattagtttcgattgtaaggtattgaaagtggctttaaaatagctatatcataccaggtaagaaagtatggataggaatcgatagaattgatgcgacttgagcatgcttcctgtaaagctcggagagtggagagggcttctcgggctgtgtacagacagttctcgcaaaccaggcgagacttgagtaccgaggagcgggcttggatgatggtcgtgagaatagagtagtagttgaagtcaattgatagccattcgcgccgcagatggctccatgattgtgggaattgctgttcttggtgacgacgagactgaaaattgggttagcggttatgctggcggatccttgatttctcttactgtttgcatattggagtggattatttgtgcccgcgccacaagatcagacagtatattggccttctccgtgtctccagttgtcttgttatcgagcaatatgtacagtagagtattcttcagctctgaatactccactatgcctgtcatcatagtagatgttggtaggtcagggtcgatgtggatcaacttggttggtttgactttcagatcaggtagagacggtggtcggaggagcaggaggctgagtgttttgtcgaagtagtagcacatgtacacactagcgtgaatattttcctctatctgacctcgaggactggtatctgtgatgttgtgatagttcaaggaaacaatcatccgtgacgctagtgctgtcaacatccagcagcgtgtcatgtctcctaaatattgcatcaaacgggtctgtcgtgagtcagaaatgagtcaatgtatataaagccacgtggaagagacaggagaaacatactgcagacagaaccgattgaagcaaaagaagactaggttcagctgcgagcggaatttgattcaaaatctctgtggcagctacttcatacctcttcttgagtgaccgaaaatgattcctcaaaggctcgcttataatgagaggggccatttttgatatacaaatcatggccttcacccagacaatgatccggtaatgctggagcacttgctcacattctgtgccctcgataattgcaaggcccatttgctctagtactttgtcggagatgtgatcaggccaattgattgttccctgagagttggttttcttatcgggtcctatgatgatcagtatcactgacatctgacccattctcgaaacttaccaggtagcatcatgtagagcaattccggtgtgagagtaggtggttgtatggtttcttgaacatccatatcaggcatagccgcagtctcctcccaatatagagtcggattggatagctgactgacgaacttgcgcgctgattcaagtgccgtgcgtctatctttcgacagagcagggttgcattggagttcatgctcaatgtactctctagcctcactcgcgtgatgtgttgagccaggagaatgtgcctggtgcgccacactctgagacttgcggtgcttacttggtggtgcctgcagggcagctgtgtcatggggctcatatgctcgatatcgcttctgattgtcgttgagaacttcagtattacttgttaggttgcccgaaggcgaagaagacgttgtgctagtggcgtaattccttgctggaaagtatattgcctctttattgcttgactcttctagcctcgccaacctttgggacaatgtctccaatcttgaaatgtcagctatagattttaaagacgcgcatcgtgaattgcacgtaccgagagacccgtggtctatgaactcgtgcctggcgattgcggagacattctgcacctgcatcggtacagttcatgcaagggtcctggcgatcgcatttcacctactccatacaatgacccgagataagcatctgtcaaagaatcatatgtgaaaaacgaatggttataccttccgagtatgacataaatcgcactggtagccgattagctgagctacattatgtttgttttagaaacagcctatgcctttcgcgacgacattattcaggcaaacttaccgcagacatattgatctcggaactcgcaacggaatttcggaatcaaggtatattaattaagcactgggggagagaaaggtgtcggttgaagttgtgtgctcggcgcccgaactgccgggaaccgagcggaagcggtttagcgcggagcttcatctcacaggcgcgatatattttcttattagtattatagctagaaggataagaggaactaattgtatagtatatccaagagtatatccaaggcgaaaggagtataaaatgtgatttacaatttgcattgaagacttttgtactattccaagctatcattcgtcataacaatcatagcaatattcacattccaatctcacaatggacccgtggagaacgtgcaattctgagtcctgaacggtatgcggaatagcccctcgtcggtccatctcattttgtgctgcttggaaccatatatggtttatttttggctcgaggtctgattgttcgccatgatcaccgagagacgcattgtactcgttcagatcccatcgcatcgcccacagaaactcctttctatgagaccacgtggaatcatgctcgccctttctttttctttggttatccttcgcgatggaaacaaagaagctaacgattctctccatggtggaagtggtgagaaggagactaaaccagcttttcgcggaggaatgggggatttccgggcccatcaagcgctggaccgtcgaaaatagaagttgcatgcagtggtgggtcgacagaaatatatgtgtatcgtcaaaaggcgcattacggagaattgattgctgtctttcaatagaagatgccatatttttgtggcgatgacccgagtgatcagagtcagagtctgaagatgcggatgattctaagaagaatactgcgtaggctctatattcgagttagtaagcttccaagaaatagtacagtggggccatacatcggatacaaaagcttggcctggagcgaggctacagctttactgtagacaacttctttctctgtttgggaagacgaccacaaatgctgcgcaattgtactggtctccagatgatgtgcgaccacatgatcagccaggtggtgggagagtcggatgcaagtattccagcatcgtttcagatcgccgagataccccagagaataactagcattgtcatgagccacgcctttgctataatgaggaggtggcggaggaaatagctcggagacgaaggcaatatcatcacccggcgacaggctgccatcaatacaatggcctggatgcttctgttttcggagttgaatatatgcccatgctatggcaaattccagcttagaaacccggccatggagcgctcgacaggaaagagacaaagacccaatatccttcagatcacaggatgctaggatcataacaaagatatgagatgggagccgctcccatcccgaagctttggacgctttcgacccagctgacatcgagccccgtttaccccttcgaaggaccgttcggactcgatggataaaatgcgtatgtgtcatagttcatacttttggtgaattatttgagatattctttcatgtacctccgaaatctttgagatgaaaccgtaaataagacaaatggatgatagaaacttagatggaatggcttcagctgtgatttgagtgtgcccagactgtaaagacgcagttaaaggaccgaacagagtactgcaaaaacaccatttgatcctttcgagcgaagatgtggagtttgaaacaaccgagattgggatgatgccggtgatgtggacctcatgccttatattcaaggcatcaggatctcacggacatctgccttcccgatccttgtcctttcctctcctcaataccaccagagatcaaattgcttaatcaagcatgctagtcatcaatgtctagctgggttgttttccaaagagagctgcagcgatggtttgtctaactagctccttggatggtggccgggcaatggactcgccatccaaacaacccgcatcgttcgcatgcgtggtctgtcacgatcggaaggtcaaatgcgataaacaagacgcatgtagtccctgctcaaattgcgccaaggcgaatgtggagtgcatctaccgtgctccaccaccgcctcgtcgcaaaagggaccgagggacaaatgaaagtatgtctcaaggacgcggaaaataccttagacgcaacacggaattcgaaagaaatccatcattcactcagaatcatcatgattctgcggagggaaagcaacggattgaagcagggaaaagtggatctgggaggatgatcacgaaagatggcaattccatctatctcgacacgtgagttgctttgcgctgcatttgacctaatgtcaaagttgaagttctgacttgcacatcagcgatctttggaccagtgttagtaatgaggttagtattttctgactgccgcgtgctgtcgatgctgaccatctttgctagctcccaaatgcagcggacgtattgggggatggatcggatggtggtaccgatgacttttcccaggatgtgagcgacgattatgcgatactatcgacatctgcaaaaagagacattctcatagaactccacccaagccccctgaatatcttcaagttgtggcaggcatttctcgagaatgtgaacccactcaccaaaattatacatgccccaactgtgcaacaacaaattttggacgccatgagtgatctaccaggagtaagccgggaggtcgaagcattgatgttcgcaatatactgcatatcgttgatttccttgcaagcagaagatgtcgagaagtcattcggagaaagcaagaaagccctcctatcaaggtgcagacgaggagcgcaactcgccttcaagaatgcatcgcttcttcgcacatcaagctcagtggttctccaggcgttcatgctatatttagtatgtctacatttcttgagatctaatccctttctaacgatgtttagctctgcatgcgctcgttctctgacccacatactgtctggacattatgtggcattgcagtaagaatcgcgcaacgaattgggattcaccgtgacggggctgcacacggactttcagtattcgaaaccgagatgcgtcgtcgcatctggttccagctcatgatcatagatggcacatctgcacagttctgtggtgtagcagcatcgccgctcccaaccacaatcgatgtccaaccaccaatgaatgcaaatgatagtgacctcgatcctcgcatgacagagccagcctatgagaagccaggaccgacagaaatgatgttcgttctggctcggagtgcatttggaaaatggctctttcgtgtgtcaagccaggctgagaattctaatactgggccatgggccttcttatcatcgtcatcgatgcccttgaaggacaaggataaagcaattgatagactggaagcacacatggaagatacgttctttcgacactgcgataaatccatcccgctacatatagcaacgacaatgatggcgcgttcagctatatactatacccggctgatggcacaccatcctcgtctatacaaggatcccaacaacatctcccaggcagagagaaggatcatcatcgagaattccctcaagatgatagagtatgctgactacgcccaaaacaatccagtcgtacggaaatactcgtggcacatggtgaatcacatgccatgggacgccatcatattcatgctcacggggatgcggcactggactgattccgaggagaaagacaaagtctggcaattgattggaaatgtgtactctgggcatattggaacgatgggcaagaacgccccaacacctcttcacatggccattgagaatttaattgtcaagacctggcggaagtacattgacgagtgtaacctcaaccaccgcacaccaacgccttgtccaaccatcgttgaatccttgctagccaaagcagcaggaatttctagtttgcaacagaaagatgaaaacttagaagctgtcgagcgaggtgttagaccacaagatcaatccaggcacgaccgttctagttcacaatttggactagatgccgaaaacttcgacttcctgcttgatgatggcccgaagacttggaatgattgggacaatcttctcggcaacttcgaaggttcttttgcagatgatgcaacatatttgtcgtgacatacgacgctgattgctcaaagttcgtacacccaccatttctagcgaatcaagatgtatggcagcaatcatcgtattcgaaatccaggtggaccccaagttggagagtcttgcgtgccaaggtacaccgagcatatagtaaatgcgatattttacgaccttatgtctcaacagccaacgctgttattttatttctgtacttgtcgatagctattgataagcatttttagtaatatatctcaatttctaataaataagaaaatgtaatgttatagtcaaaatatatgtacgatgctatgagctaagaatatatatatcctcatcactacacagttcattcaagtttccgaattccataaagtggatagatataatatgaaaagcattagtccacaagaaaaagtcaataatagctacatgtagatagttagtgggtgttgcgatatcatcttagcattactatgtcttagtgtctagctcgcatgtgagatacgtcatatgaaaagcttcattttcacctgctaagttgaactaggtaactattgactactccgtagttaacaagttcgataacagtttgcttattaagtctctgatttggagtcccagtctaagatcatcttgaaaacgaggcgctggtcggtatacatcttcgaactcgcgccgatcggcatgcgacgctccgatgcctccacgtgtcttggcgtctgcgatcctcggggtcggcgactaaacagccgaccagcgatgatcatcaacattttttggagtcatgtctttacacagcgctggtatgtgcttgatcaaatttctatttaaagtcgcgttccgcgcggtgccgattttgaatatgactaccaatttcccacctgcaatcgcctgagcacggtattctgccatcaattccacctacaaaacccccaaagatcgttccaagatgaaacccaaaacggatgttctcattgtcggcgcaggcccaactggccttgtccttgctctgtggcttcaccatcaaggtgtcaatgtccacattttcgaccaggcggaggccccggcgcagaactcccgagcgatcattgtccatgcgcgcatagtcgagctgtatagacaacttggattgagcgaagacttgctgaaacttgggtacaagctgccggccacgaatctctgggtttataggcagcgcaaagcgcacgtcccgctggaagacttcggtcgcgatttgactccgtacccgttcatgctcagcgtaccgcaagacgaccacgaaaggatgctcgaaaagcgactgaatgacgtgggcatccatgtcgagcgagggtcgaagttgcaaggctttgtggaccacgggtctagcatcactgccaccttgttccgcgaatctgatggcagctcaaccacacacgaagcatcgtacatagtgggctgtgatggggcgcactcggttgttcgccacgggattggtgccaaattcgagggcgaaacgtacaaaccgctgttctatatcgccgacgtcgaaggcaaaagcgagaagcatttcaacggcgaagggaacgtggtgttcaccaacgacactttcaacctggttgtcccgtacaacaaagccggccatgtgcgattggttggtattatcatgccggatgaaaacgacaatgacaactctgaatcgctagtgcatcagcaccagatcacgttcgacgacgttcgaccccagatcatgcaagccatggatatcgatatcaccaaggtcaactggttctccacctatcgcagtcaccaccgtgtggccgacaaattccgcagcaatcgggcattccttgttggggatgcggctcacatccacagcccagtcggcgggcagggcatgaataccggtatcatggacgcgatcaatttggcgtggaagctcgcaacggtcctaaagcagacaaacatgagcgaggatgcacaaaaccagcttttggattcatatgagaacgaacgccgctcattcgctatgatgatagtcaagtccaccgacgcgggctttaccacattgacgtcaaaaggaatcttcccacacattcttcgaaattggctgattccgtaccttgtgccactgctcttgaaacttgattttgcccggactagaatcttccgcggtgcttctcagctcgtttgccactataggggcagcagtctttctcagactggagaaggggccgtgcagcctggcgaccgtctcccatgggctgcaatcaacgaggtggataacttttcaactctgcgagaagtctgttggcagctccatatctatggcgaatccctaccacaaattgaaaagtgggcccaacagacgagtgtgaaggtcttcgtctttccctggcaggatcaatatgccaatgctgggctgatcgagaatgccgtttacttgctgcgacctgatcagtacattgcagggattttcaaggacccctctgttgaggggctgaacgagtactttgctactcgggggttgtacctaggtcgagactagactgtaaataccagctctctccactatccagttcatcagcttgtaccctgagaccacgtgcattgccctcgcatgttaccggtaatttcccgtttgagatgcggaatatcatgtacatttccaatctagtcgactcccgaagtgcaccaagtcacagcttgtgaacgggacatgggggccacatggtctgcacacccctacggcatgccagagaaccggagtgtgattggtgacttggcacatattaaagcccgttgacgcccgctgtgattggtgtacctgtggggctaaccatgttcccctactggggtgggtctgtgggagaccccacctatactttcgcagggcattctccccggcactcgttctatgtggcatccaatctgtatacgacaattgataattaccgacagcctccgagttgtttcaaactccacctatgttgtgtcgggcatagtcgcttacaccgttgatcggccgctgagaactccccgggtgaacatgtggcagcgacggcggcttctcatttgctcgagcgtctaattccaggtacagggctcgaatgccaagcgtctctcctgatgcattggcatgtagggagggagatataaaagccttgcgaccaccgagggaaatgatcttcgtactcacctcagtccatctctctctaccacacttcccggcacgatgaagaccaccgctctcatttccctgatcggcctgtccggcaccgcccttggtgccgctgtggacaagcataccagcacccccttcggctacaagcctggctccaaggagtccattgccaacatgaaggacaagattgagaacgttgtctggatccttctcgaaaaccgtggatttgacaacattctgggtggagtcaagaagcagggtctgaccaacgttgtcaacaacggtcctttctacaacctgcagaatgtcagcgacccccacagcaccaagtggcccagccagtacaagaactacgactcggtgatcaacgatcccgatcactcgctcactggtaccaacttcgagctcttcggccagtacaaccctgacaatgccgccattgccaacggtactttgacccccaacctgtctggctttgtcgagcgtcacatgctcgcccaccctaagatctctgcccagcgtgctgctgacgaggtcttgggatactactccgagagccagatccccaccattgttgacatggttgatgagttcaccaccttcaacaactggcactcttgtgtccctggtgtaagtaccttccgtggtgcacattaaacaaacatcaaactgaccatcaattagcctaccaaccctaaccgtctctgtgcggtctccggtttcaccgatggccacggaaagaacgacaatgatttcgatgtctccgccatcgagaccggcagcatcttccagactgcctctgagaagggcatctcgtggctcaactacgacggtaccaacggtgccttcctctccgatgccatgttcttcgactggaccgcgaagaacgccaagagcaacgtcgttcccctcgagaacttctaccaggacgcctacttgggcgtcctcccccagttgtcctacatcaacccctcctgctgtggcctgaacaccaactccatgcacccctccggcaacatctcctacggtgaggtgttcatcaagcagatctacgacgccgtccgcaccggtcctcagtgggacaagacccttctcctcgtcaccttcgatgagactggtggattcttcgatcacgttgcccctccccttgccgtccgccctgacaacaagacctacaccgagaaggcctacgatggcagctcttacactttcagcttcgaccgtctcggtggccgtatccctacctggttgctctctccttacactcccaagggccacgtcgagggatacggtaccgaccccgccaccggcaagactacctcttacagtgctacctccgtgctcaagaccctcggtctcctgtgggatcttgaggacagcagccctcgtgttcagcactctccctctttcgatcacctcattggacctcgcattcgctcttctccgaagacccttgcgaacccccacatcttccccactgatgtttaagaggtgctcctacagagtggcactggcttgatgagattaatcttccgcaagttggagcttatagacacgcgctgcagattttgcagccgattttctactagtctggttgtttctagttgtttgagtacagtcaaaatataatacaaaaaaaatgtttttaacttcttttcaacttctttcaagtgtctttccagatgttcttagttatatgtctcttgggataataagccgaaaattatagagcatggtgaaaagcacaactcggacaaggctgttagttcagagaaagttcagcaggaatcagctactatattttgatcagtatctcagcttttctatgccattcttggccaatttcttagtttggccgagtggagtggggggattatttaaccccgacacgattcggcagaataacttggctttgtatacatacttgatccttcattgatgtgagagtaaatgtcttgaactccccttgaagctctttcgcaatcaattctagagtacaagttattttatcatagaacacagcgaaaattcaagagagaaatatgcaaaatatacaaaagtccggatttgtgcctaaggcatcaaccctaaacccaattgagccgtcgatctggagattctcgaattccgctccgagttgacaatcaatgaccaatcttccctacgagttctcctcacccacagcttcacaacaatcaaaatgccttctcctataagattggccaatgggctcctaacccgagccacccgcaatatcaccctcgaatccgcctcaacacaacgcatcctccctctcctccgaagcaacaccgcaccacaatgcagagcctacacccaagcacagcgtccacgatgcgaccaaaacatgcgcgccatggtctccacacagaacaaattctcaacctccgccttccgagcaggccccaagacaatgggccagatgcgccagcgcaactcgaccggcccgttctcgtggaaggccgcactgctcttcgtcttgaccggcgccggcatgatgctgtacttccgtgttgagaaagcgcgtctggagcgcaagcgcatgacggagatgagcaagggcgttggcaagccgaaggttggcggtccgttcgtgttgaaggatcttgatgggaaggagtttacggcggaggacttgaagggcaaatacagctttgtgagttaatccggaggatggaatagagagcatcaatggattcaatggattcaatggatttgacatgttggaacggtactcgctaacacgatctcgctttatttcttcaggtctacttcggcttcactcactgccctgatatctgccccgacgagctggacaagatggccgagattatcgagaaggtcaaggctgctaccggggatgagaagatcttcatgcccgttttcatcacctgcgatcccgtccgtgatacgcctgaggtgctgcgcgagtatctgaaggagttccacactggcatcgttggcttgactggcacctacgatcagatcaagcacgtgtgcaagcagtaccgtgtgtactttagtactccccgggatgtgaagcccggcgaggattacctcgtggaccacagtatctacttttatctgatgggtgagtgctgataagaccttatacataaacgtatgctaacctttatcatagaccccgacaatgacttcgtcgagtgtatcggccgacaggatacccccgagtctgcatccaaggtgatcctggagcacatcaatgactggaagagagaggggaagccactcaagacggagtaagagtctcgcgtcaggtgtatgtatggaaattgtacaatagaatcattcgaatatctgaataccctactcacgccggaaccgtgtcccaatgttcccgtttttcgtgcttttgctcgtatactcgggtattgcggccaagatccgtcgaatatagaggcccagaaaccaattagttttaggttggatgccacctgtaaaagataaaatcagcattacccacaagccacactcgagaataccaccaaccagccaccaaaaacatccctaagcccccaaaaccctcccctcagcatccctctccgcattagccctccactccatccccccatcaacaaactcctccctcttccaaatctccgccttctccttacaagcctccaacacctcctcaccagccctccacgccgcaccccgatgtcccgcactaacagcaatagcaatcgaagcctccccaatcggcactgtcccaagcctgtgcgcaatactcacgccctccagcccatgcgtcttcaccgcggcctcggcgatccccgctagcgtcttcagcgccagaggcgggtacgctgtgtagctgagctgcgagacggagcggccttcgaaggtgtcgcgcgtcgtgccgaggaagaggatgttggcgccggcggcgggtgaagatgtttgggataggtaggtggttgcgtcgagggtgttgtaggttagtgttatgtggatgttttgtgttgtggagttgtgggtgcgtgggtaggtttttgggtcgaggtgagctgggaggggggttgggtcttgggatggcattttgggcgcgttgatttgggagttcggtataactgggttgaggaaatgttgtttcaattgtggttggaattggcgttggagttggagctgggctgttctgttccccctcgatgcttatctgctgcggggaccggataagaagtgtcccccgatttgcggagagcaagtcgtgggagttgacagcttgtctatgttggttctgtaatctggattctatgcttggatgtgttcacgtctcttcatttcaggaaacagtctaggtacaatttatagagtatgcggaaaatggcttgccttgtggccatcctcagctctcatatcaaacgagcaatacaacagcctcaaagggccgaagtgtccacttctcaccggagaatcgcttggaagcctcctcaacaccttcataagtattgagcaagacctccttcacgctggtgataccgttgctcgccgcatcccactctagagtcttgtctgtccagtggcacacaaccaaggctttttgatcgccatactggcgagtgtacgcaaagacctcctggcttggcttgtccagaagtgtgaaatcgccatacacaaagatatcaaggtacttcttgcgcagcttcagcacagtcgcccagtaatggtatgttgagttggggtccttgatttccgcctcggcattgacccgcacataatcggtgttgatagacatccagggcttgacgccaggtccggtgaagccggcattctcagcagcggaccactggaccggggtgcgtccgttgtcgcgagacttcttctgatattcttgcagggcaattgcttgggcagcaaggtcgtccttgggtattctgtagaatactgtcagctaacgtccacgagttgcactaggaaagtgtcattaccttttccagtggttcagacaatcaatgtctttgtattcttcaataccccattccttgggcacatttcgggttcctatttcctgtccctggtaaacaaacggagtaccagcctgcaatgccagcgcagtagccagcatcttcgacgcgaccagtcgatactcctcactcgcatgcgcgaagcggtcaatagagcgtggctggtcatgattctcccagtagagcgcattccagccatcattggcatacataaaggtctgccaccgctcaaagaagtccttcaagtcagtgagttgccagctgccaggttcaaacttatcaagcttgccatggtccaggtcaacatgttcgaaattgaagatcatattgatctcatggcggtcgaattgcaccgcacgcagcacttccttctcgtcggtgacgaacggcatctcacccacgctgaaggcatcgtactcctggagaatcttgcccagatcctggaggtactcgtgcaagcgcgggccgttggcataccacttgtcgccccactgccagggtgtccgcgggtccttgatgggtccgtcggggaatctctggtccttgctaatgaagttgatcacgtccatgcggaacccgtcgcagcccttgtcgagccagaaccgcatgatatcgtgcacggctttgcggacaggcgggtgttcccagttgagatcgggctgctcgactgcgtacaggtgcaggtagtattcttgggtctgctcgtcccattgccaggcgctgcctatagtcttcattagatggatgtaattaaccgacgatgataaagtacgtaccctggaaatgagagacccagttgttgggaggctggcggttgccttgttcgtcgtacttagccggcttccagatgtaccagttacggtactcgttatccttggagctgcgcgcctgcttgaaccattcatgctgatcgctggtgtggttgacgaccagatccatgaggagcttcagaccccgctcatggcatccggaaatcaatttttcaacatcttcaactgtaccgtactcatcggcaatgctgtagtagtcggagatatcatagcccatgtccacctgcggggatttatacgatggacatagccagacgatatccacggcgaggttcttgatgtagtccagcttggaaatgataccggggatatcaccgataccatcatcatttgaatccttgaaggatgcaggccagatctggtatacggagctctctttccaccaggcacggtggttggagtttcctggtgtagccatggcggtttgaatgcggatgacaattaagagatgagattaggatattccgagagggagaagagggatttgggattctggagcactgctggctatatatatgtgttatttgctgtaagagatgtgttgttaaggtcacttgaagcatgtcccaccgtggggcagatgcggacaattatcggggtcctcagcgtttgatatgttctatgtcggcccgagatcccctcaacgattgatacgtcgtatgtcggcccgagatctctcgacaggggtgagccgacggagtactctgcatgggttgaatcagaagccaaactgctgtggatcgtctccacctagatgacatgggactaacgatgatgcaactggactggatgggttcttggcggaccatctgattcatataaattgataatgagaagtagaagtatagttacttgttaagacatcaagtaaactactgtttccgaattgaaaattgcactgcatacttccatcatacgatctacaatctctacatagatctcaacatcattgcatggtacaaattcccacctagcgggctttacgttgaattccaagcattgaattgagcaagtctgccttatagggactaatccgggaggtttctggaatcctgtgaatgttacatgttcgccttgagtcggttgatagaaaattgggggttattttcgtcaattcagctagatctccaagccgttctcaaaacatccggagaacgaatgcatatagaatgcagggcaagccttcagaaacgccgctatacctcagacgagtagaaacgagtcaagacgaggtagaaatataaagagacgagatagaaacggcgaatctcaaggcggtgtgacggtaaatatagcggaatcgaggtaaatcgagagcggtggattggccatgttatcgttatcgtagcttcgattattccatctccggcttttgtaggcgatcctttcgctcagttctccttttaaatgctcatcaaccatggcgcctccgtaccggaatgacaggttttcttctggctcatctaaccgaccgttcccttcgcgaaatgatcgcgatggccgcatgtatgatgatcgatcccggtctcgctcgcctggtaagcttctccccgcacgtcaatggtgttaagcccatagacgccttcggcacgggcccaatttctccacatggtattgaatcgtggctaactttattgtcatttgaatcgatgaataaaggtggtgcacgctcccctcctcgaagactagcggccgacagcagactcgagtaccccagagaccgagaatctggacaaggctaccgaggccatgatcgagatgataatcgccgtcgaacctcgcgctcttctcctcataggggcagaaacgcgtacaaagaccgcgatcgagagggttatcgaagcgcgagcggcaatcgaagccgaagtcgcagccctcgtcgaggtcagccgaatatgggacaggtgagccgagaagtgatgatggatggacttccggtggacatgaccgaagaagatgtgagtcattaaatcaatgccctgatcaggcgttaaatatctccatcgccgaggacaaatactgacaatgcgctctatcatgtgcaattagatcgcgactgaactcagcaatgcctatcatactgacggcctggaagatattcgagttattcgtgaccgacaaacgagtatgtgaaagaaacagaccatttgcaaacatgcgcatcgttttaacctgatattgtgtccaacagagttgtcgcggcaactagggttcctgcgattttccacgattgacgcatcacgcgaatttgtcgaacgcaatcatccttccatctttttctacggtcccacaaacgaccgtagtactcaagttcgcatagcttacagccgtgagagagaagaccgagctcgcgcaaaaggtgcgagtgactggaactgcagaaaggtaagttaacgtggtggggacaggaaacatgctttcctaccccagacgtacgcaattactgttactgttctgtgcttaccaaaccagtgtctcgttctcaacttttccacacgtccacactgtttcaagtgcggtaacccacgacccggtacgtataccatcctccacccctcaattctcatcaacactaatcatcctcgcagatatggataacggtcccccaggagttccgattcctaagatagctaatgatggtgacaatgatgtcgctcctgagagccagccttcccaattcttgctgatccgtggtctggaggcgtctgtcacagaggagcttcttgccaaaggagtttctaaactctatcggccggctgtcaacaatgacagcgccactgacaatcaaaagaagggatcgaagatagcatcgaccactggtgacagcaacttgggagctcgcgaaggctctctccgccgcgtgctccttgtacgtgatcgcagaaccaatgaaagctggcgttacggattcgcagaattcgcgggaatcaatgtacggttatcattcatctctcatattgtttcctcttctaacgcttgacatttcaggatgcacaagctgccatgacgagactcaagtctttcgaaaagtttaccatctcctcaaagccggtgttggtcacctacattcacggtggagtttttgttccagtcatgaacgcctcatccagtgctagtcacttcacattcagcccatctaacaacccatcgctgaagttgatgtactgggatgatgcagcatacgtgaaggaactcgtgctgtcaacagaggaagacgatcctgtagccaacaagacaacttccaaccatggagacgtccaagccaagggcacgaaggacgataaaggcaaaaagagaaaagccgatggcccgcctatttcgaaccccaagaagcttgcaatgccatcccagctccaattctggagtgaccgccacgctgagctacatgggattaacagaaatgatgccggaaaccccgcagagggctcgacctccgcaactctggcgactgactcggccgctccaccagctccatcattcgcagactacaaccagaaccgctgcctcctgtgcatgcagcagcttgtggatgcgggtcatctcagataccacgagcgcactagtgatatccacagcgaaaacctaaaggatgtcaaattgagggaactcggcgtatgctggttgatgatctatggtatcgtgccgttgcctactccgaactatcaagacagcaaagacgaatatcgtgacggacttgaacaagaatactccatccctccatccgctcgatcctttgcagacctgaatcggaactggtgcctgttgtgcttcagcaagtttgatactccggcagaggtcctcgtgcatgaccgcgtcagtgaataccaccgaaaggaattgaaagatgaagaggcggtgaagtggggcttgaacaagcttaaagaggcggatatcgcgcaggatatcgcgccggcggctccagaatatagagaccgcgcaaaggagcgtcggaaggcgttcggacgtaacgatgccaatgcccgcccgagaccctctgaaccagaggaagaggacgagacacccgttcagacatcctcgatcggcgcctctcttctcagcaagatgggttggtcggaaggatctggccttggtgctcaaggaactggtgtgactgcgccaattgctacagaaatctatgcccagggcgtcggactgggtgcgcaaggaggtcgactgggcgatgcaaccgaggaagctggtcggaacactcggggacggtacgatgaattcctggagaagaccaagaacgccgcacgccagcgctacgaggagatggaccgatcttgatcaattcaagacggttgaatgtacaatagggtggaagtggtgggggtggttgggatatgaattgaaagtgagggggagatatctgatgttcaccttgtgccataactgggcagccgattccatgtatgattacgacaactaatgaacttgtacgatgttcctaggtagttgatttcctctgccacttcttggctatccctttccgctttagtgctcaggctttgccgctttttgctccctgaattccaaaaagcgctcatgagtcgtagtaaaagggaataacttggccaagtcggttaataggccttggcatctcggtcttttccgttcctctctccttccacttaaccgcgcaaccacacatctcacctgcaaaaatggatgagctccgtaatagacttgacagtcactggactggtgcccatgtggctaatttgaaatccaggaccatgttgcctggtagggggaatagggacacgttgacagtttgcgagctgttgagcgaaccgtgggcttttgactctgtggcgttttaatgaggataatatcctcgtgtgcccctatttctacctttcaactgacaaacttttccaacttctagtcattctttttttggatattgttgttttaaatcactttctttgcatcatcagtcactccttaaaactgttcgattgagcaaaagaatacgacaatcaaagatgatgcgcttcgtgatttctctggtcgtctcgctcgcttcgcttgtcgctgccattgaaatcaccagtcccgctgcgaacacgacctacgcagccgggtccaccgtcaacgtcgagtggactagcgttgataccgatcctaccaacttcagtctttatctctggaactttgtctcctggcctccatcttatgttccgctggccatcgacgtccccacgtcggatctgtcttactctgtccaaatcccctgcgagaccacccccgactggggttaccaaatcagtggtatcaacggcacgaacgtctacatcatctacgcgcagggtgagaagttcaccgtcgacaatgccgacaacagcaccgcctgcgtggacactcctttgccgactacatccatctgccccaacgctgcggcatctaccgtctatgtcacggtgagctctactcccagctcccgtcctttccatcatccatcccacgcccatcatctatcccacgtccatccttctccatcacccagcactgccagcatcttgacctctggatatacaaagcctggaattgtgcctaagactataggttggtgctcagactattcccaccctgtaaccttggacaaggttcccgccccgactccgactctttcggctcccaacgatacaaatggatctgatgcttcgccggtcttcactgcggcactggaccaggtcactgattcccctggcatcctcacattgactatcactaacactgcgaccgtgctggcttgcccgaacgtgcacacaatttgatggaagtttatccgagcaaccggtgaccagtccacttctttatgtcgatgtatgttatgtagtaccgaacgagaaggaatttatacatagtagatcgaaatcaatttcccccttgtactttttaattgtttctcaaattctgactacattgagctgctcactgagcttgagcccggtctgagctttactcgctgagtcggactctgagcgccctcataaaagcggcggcagccaatataggaaagccctacccggcaggggaaacactacgtagagttacctaggtagtcatgctggcacccattcgggtgtctttccctttccattgtaatcggcaagccatgccgagtaaataaataatgtacagctggtatcaaatcatgagtagagtgtagtgagtgtagttggtatgtgcaagtaatttttgcagagtccttcctcagttctctttcgtatcctggttctcacggaacgccctcttcatcttctccttctccaactgcttctcaaacttatcaccgaggatcttagcaacccactcagtaacgtccttctcaagctcctcatcactcttcacaggcgtatcactaccaccctgcaacccgttccgcacgaatctccgcatatcctctagcccattaatattcaaagcatacccgaccgcaccgcccgccatcaacccaaacgagatcacattgagcgtagccaaattcagagcctcgaatgcgtcgcccgcggagttcgcgtgcggctggtggtacaccgagcttgtgtggaaaggcgggatgcacgcgatgcgtttcttattgaaggagcggcgtgtgattaataccgacagcgcgaagaacgtcattcctccgaagaaaagtttgaggtttgtgtttgtttgcggtgagggtggttgcgctacttgtgtttgggctggtggtgatgggttggcgggttgatcgggtgtcgccttgtcttgaggtgttggttggggagtctcgggttttgggcttgagccccagccaaatagtgataccatttttatgcgcggggtgtgtgagggcgagggttgtttggttggtgatgcgaatgcgaggcggagctgaataagctggaaaaggatgaaagtcgaaggatcgggagttgtagaattcaacagagaggatgactgggtatgatatttttccgcgaagataactcgaagcactgtatctgtgtggggttgtcttgctgttctcgtgaatgaagcaaatccgcgcggaggatatggcggatgtgcacgtgacccggttctcatcgaaggttccaaagttgactgccttcacgttacgacaattttgtggaaatttgactcatacttcggtgaaatgatgccgttgctttcagatagacagcacgcacaggaatatcccgttccggaactatacgaagcaatgaatggctacatcttagatgaggccgaatgagaatggaagtttttagggctagagcgtcggctggctcgggttctgtcgtccttgtgcaagtaagtcagatggaaactgtcgaccaggctgtcattaaacaaattatcttctctatgtatcatcaaagcataacgccaatcaaatcggaagtatgtaaggtatgcaaaaacaccgtggatgcaactgtcagaataacaatagcagaaaccgaaatccattcaaaccatttcaaaaagcattctcatatgttcataattcagcgcgcttcgtcaatatactgtgctcatagaaaaaaagtaaatcatagtaacatcataatagatgcaatccaaatcgtcaggaaattaattcatatcgccggtggtgataagcatatcagcgcgaccaggccgatggaaccgatcaataccaagatgctccttgccgtcacgaccgacataaatgccaaagccgtacaaaggcaggtggcgctccgagggtggagcaacaataagacgagtaacgaggtcagtcttgctcctgggctcgcgcaagattttatcagacagaagaggcgactgataaagatagctcatcagatcagccaaggttgtgatatcgtgtgggagatagcgacgacggcccggccagattgctatgaaagatacggcatataggccacagaaggcaatcaaagcgtagaatgctggcaaataggcagcgatgcggatctggtcgtggtcggagaaccagagggcgatgaagacgcctccggcgagaatggggatggcgagagatagcaggctcatgagggagatccaggcaactttgaagtggcggttgattatggcctggatggtgacctggaatgggtaggaggatgggtaggagagtaggatgctccgttcggcagatgcgccgctgggggatgagagttcggcgtatggttggagagctcggaagtatacgtcgacaggttgccaggccaggaagaagacgtttccgattagtgcggggataaagctgtataggaagttggaggaggagaatgcacttgtcgatgggagtgttggtagcttgggagggaagccgccttcgatggcgctgttgataaagctaacggcgacaaaagcgacgaagagggcgaagacaatgagagtccaaataaatactgggacgttgcgcagaaaccaaggtgtccagcgataacgggtggatggcgagtataggtggtgatcttgtgggtcattggcgaatgcaccgttgtgctcaagatcaaagcgaaccttggtaactccgtgtggttgatcttctcggcttttgcctgtctgatggagagatggggtgcgcactggggcatctacttcgccgattccgtagaagatctcggccttgctcgagagtttccagtatcccagtcgaagtactcgggggtcgagggattctcgcaccgaaggaactgtttcagagtgctcaaaatcgtggaggatattcgatcgctgtatgatcgagaccaaatctgcgaggctgacgggatcccacatcaagccagacgagccacgaaggaaacggatgaaaagcatgatcaggcctagtgtcaaaacaccatataatcccaccaatgtccagcccacggattgaaccgaagcccatcgccagacaccttgtccgtcaatgatatagtactttgcctggaagagacagctgagcagagggatggcgaagaaattcgaaagccaaattgtgaacaaagagaatccgaacaaggcttcaccatggcggaaatgggagaagtcggggaaaatgaagttctgcgagagaataggcaggcggttcatcaccagaccttgccctcgctctgctgacatcatagaaaatggtgcgatgcgatataccgcagcttgaatgacgaataaccatatgatgatgattgcggcagctatctgtggcaggaactgtagcacaaaatatctcgagtcgccttgacgcacgtagttccacaatccctcttcaccacgggaccaaacattgcaaaacactatacccgctatcatgagcagacagcaaaatatcgtgagcgccaaagcccacggccgcagaacaagaggcagatagtccaagggaggatacaacatgctcttctccggcgcatcaacagccatgaaggactcggggtccactgacattggcgtttgcggcaaagcctgtggtgagggagatgtataggacggtctcactggtggcgtgtcatgtcgaatgggggtccgcgtgcgggtgaaataaccgagtccctcgtcccatataagtctatcggttggatagtcacctgtcgtcgtggtggaaatagagtcattcctttggagcccccgagttctgtcttgggtgatctggtcgattgcaaaccggacgtatggggagtcatctgtgcctggagtcggagatggtcccgggtaatcactgggggatcggcgagaagtcccgtttgatcttgatccatcggatgtgggactgatgtgggccgctctgtcgtctacgaaccgaactgtgctggatgttggtgggcgttgggactcgcgatcttcttgggcaagctgtatttgcgacatggcgggtgatggtgcgtgggagtctggagtcctgaatcgcatggctgttgctagactctccggactagaggttcgttctgagaatgaatagtagtcgtctgatgcagccacggactgttgagattctgatcgggcaagttgcggtttgcttgctatataaggatcagttgacttgacttctggaagttgtgtaatgtctgtagttaaaaagacaacggggcaggggttcttatatgcacgtactgttaacgctgcgcaggctgaagtttctcgcctggttcatcatgctggctggatattgatcccacgcgcaacggtaattaatctagaagcattcctcgactcccttgagatacgaagggatttttcgagggccagcaatcgctgcccagcgggattttgtctgccatagtgctgggtgacgtctcccagccaccccagccacacacgctgagatttgcactcaacaaaccaataaggatgaattaaattgaagagttgaaactcaggcactattcatttgatgaatcatactagaaattccatcgaattaaaagttgaggaagagttacggaggtggttgagttgtttcgcggcccgatcaccagcacatccatcgcctaaagcttggccttttatctctccaggtctcaccaagtctcacacccgatcacctttcttttcaattttccaatttcaagaggtcaatttccacggtaaccatatcaaagccctatagttcttcttgaaggacgccccagaactacaatgtaaccatccggactctgcctcgcatctacaattgccacactggagccccaaggcaataattgccaacaattgctgctctagatagcagctatacgcaataaaaaagcagggtgtgttcaaaaatttgtcaatggttgcagcccactaacgcagcgtggtgttgcaattgttgttctcccttgcaggtataagtggctggaactagggcttcacggtccgccgagcacatgaaaacataaggctgtatctagggcagtatgaaacatgatcgagggcaattgtgtctattagacaatgtttaggatacgcatatctgtcttattcaaatgaagatttctgggttctcgttcggttatggataaacacgctcagaaaatcctgacatatgaatagttggtccaagggacttagaaatcgagaaacagagagatgaacatgactaatttttccgtttgttattaggtgctggatttgaaatcgtctgcctcttactctgtacaacaaatagttatatgtgcttccccggttctgtttgaagcttgccatataccaattaggtgtactccgtaggcacgttcaattccgattggtggcctcgtcattttatttggtacgttgtaaattcgcaccatgtcctgggactcttcaagagatgatactaccatcctctatttgattctattgatgctataagcaggccgaggttattgattccctacgctctgtgactccatttgatggcaatctaccattcttgatctcgaggccaattcttaacacattcaatgtgaaattattcttatttctcggccattatggcaaaggactctgttcatacatgtcatgtcagtaagaggtaaatctggcaaacttgagagtcgattagcacggaggaaagggaagcaggacttgcgcagattgccagcacctccaatcccgattctaacatagcgctcttgaaaaccagacgtcgaccgagtatcctgagccccattgagcctagaactctgcgctgactgtgactggagaagagctactccgtctaaggtttctaagggcagttgcccttcgtcgtcctcggatttctgccgttttggccaactgagaaacctccataggcagcgcatggttttcaaccggaggaatgagtaaacaaccttggtcgagggtttatcaaatcagtactctggctcttaatgtcttgatagattttacttacgattgcttcaaggcttcgaccaacttcaaatgatctttgcataaccctgtctcgtccgggaataatagctagttatacgcctagctagccggtccctttccgtgatgcaacgggttacgcagaacgaacactgtacgaccatgaacttcaaatttcccggaacagccagactggctaccgtttattgatataggatgatataagaggaaactatgacatatcagtatatgataatttagccaccaccaggagataagtcagtcatacatttgagatggagtaacgcattcactatgtgtgacaatatatgcctgcagtttttgcacgattcactaaagcctctaaagcctctagagaccaatttgaacaaaggctttgtcaaaatggagaaaatctggaggacttttattctatctacctcaaaaaagatcaccgttgatatacttctatttcattctaaagcagtatcttggggatcaaatgatctagtggtgtgtccaggttgcaatggtcacacgactgtgacgcgatagtgaaaccccattaggaactattggtccatgtggtcacaagcttaaggttaatgacctgaagatatcaactgcattcggagagagcctatgtagtaccttgcattagcaaaagaacggaagctgatcatgatcaaagatgatcaaccttatctggtctccaacaaatagaatgacgtttggatatccagttagggatttgaggtggacctgtttcatattttttaaaaaaggtgggactgtgggcctccgacggtgatactgagagtccggagttcaggcccaagcgtttccggggctaaatatcccggctgatagcaaaaactgctgtgccgcgttagtgggtcagacggtggcgagattgcgagcaatgtttgaagggtgtgcctatggatcgcaatatatggcgtatcgtatggacacattttagaaacacagatcttgtttcatatgaataagatgaggcttctgaaaccatgtacatattggctctttgaagaccctaattcgaaaggagaaatgagcttcagtcacttggtaagaaaagcaggacccaatcgaacacggcagagaaaaagtcgtgtttcctaaggatttaagaagttggcaaaatagccagcgggaatagccaatgatcttgcaccagccccgattgctccgacggccttggcaaccccgaagtggcacttcaaccgcgaagggcgaatgagaaggcagaacagctctgcgccaacgtccccggcattccagaggggaaccgtgcagcggggcaaattatttagcctcgcgtttagatgttcaaaggattggaggaggaggtcaagagagaatagaaagcttgatatgaggaatgacagagtaatgtacagagtagataggagggagtacgtatgttgtagaaataaagtggcatcatctgactgctgcctgaggccagaaatccaaacctcctcctctctccgcagattctctggtttatctgcgctcctcgtcattcctttattctttttgagtccgtcgattcttttgcttctttgaatttccgtcgactcttaaattcttggctttcccctcatttgcttcttctttaccccttctttgctcagaaagcttttatttcgatcccgggttcagatgtccccagccaatgtggtgttagaacctcagctcttgcgtcgcgtgtgccattaggccatttaaaaaataatcacttgttttgtccctatcggatttctcctctggcctggaaaagagaaggtcggcttcttagggtctcccctcatcatgttgctcaaacccgcgacacccctcaccatcttgctgctgatcgcctttgcgcttttgctactctcatgtatctcaactcctattgtgaagggaattcctctagcaactttcaaagatgtcgattatggtgtctttggatattgcaagggtagtacctgtaccaatatccatgtgggatacacgagcagtaagtctcccccctgcgtgtctgcctattctccgctaagtttcatgcagatgatataagtagcacaggcgatgatttcaatctcccttccggtactcgaaagtcactgtcctcgattctcattatccatccagtcgccgccttcctgacccttatttgcctctgcctggccattgcggcccacttccatgcgccctcccactcgccgcgcttcctattggcgcttctcatcttgttgctgccaacactgctcgtgtctctcctcgcattcctcgtcgatatcttgctctttgtaccacatctaggatggggtggttggattgtgctggtcgcgaccatcatcctcacctcctgtggagtggtcacctgtgccatgcgccgaacccttgtgagtcggaaggcaaggaagcgtcggatcgcggaaaattctgagatgagtggagagaactattataaccgacagaatgccgctgcggctgcgccccctgttccggctcccattgaccccaaggaagcctttgtgtcgcactctctcaactccgactcgggcccaacattcgcatccttccacgtggaaacgcgcgacagtgatgacgatcgaacacccctcaactcgcggactcccatgagcgataccccagcacaaccggaccatcacggtgctccctatcgcggcccgcaagatgaatttggcaatatcccgcctcagggcccgggcccgtacggtgcaggtctaatgtcacggaatccctccgatccccgggttcgcccccaatattccgatggcagtatgggttctcgaagaggaggcgcgccgcctggcttcaatggacgcgggcggggtggatatcctccccggggtggacgcggtggacgcggtggacgtggaggaccttacatgggacctcctcgcggccctcctggctcccggggtggctacatggggccaaatccaggccgtggaggtcgcggtggaattatgccaccccggggaccaccagtcggctatgagtccggtccaggcggccccaaccgcggtttcgacgcatacggtcgacctgggtcgcctcccatggatgacccttatagttatgggccaccgggtcagatgcaccagccacctcccgggcccattggcatggccgtgtcaccggagacggtaggccaagccattgagatgactccgcaatctcgcccgcagtacgagatgcatgagtcgactcaaccaatgagcagcgtaccgcaaacactgtcagccgaaaaccacggtgccgtccctgaaagcccgacaagcatatacagtcgaccgaagtaagtcggaatgctacgaataccgttcctaagttgaccactaacctttgttcagttcctatgatcctcctcgctcgggctggggtgcaaatgatcctcgcactgtgaccccgcagccaccgcaacaaaacaacatcagtaccaattactacgaggacgtggatccccgttttgctcgtcggccatcgcctcctactaactctgggatccccccctctctgacgcctggagctactcactgtacgtacactcacagatcacacgtgttgaaggattcttgctaactttctcctagtttgatgaaatctattggtttctaagtgttattcatgtttgacacgattctttccacatcttctatgctttgcgataccctttgcttttcttcttttctctggctaaattttgattacttttttccctccgatttcatgacacactaagtcattttggggaatggagttatggtgtccttttatcttcccattcctctataaatgctctcttttgggacgacaagacgtttcatcttgtccccaaaaatccgccacaagacacggcgttgagaatggtaattcttttcgctgctcgattgtactctgcctggacttccatgtatagcagcaggcggatacgatgtacagaaacaaattcctaagatgtctggctttatccaagatcaacagcatatgacgctgctactgatttgatcttttttgtactttcttccactgagtggactgtgacttttatcttacccgaatccatgtacatttctgttctctggtacatttgacttttcacaatttccaaacataataattagctcttctgtgatctccgcatatgattgaaatcttctctccccaaaagaaagatagccctgtaatataacatagatcgagatcttcaatcctccttgccaatcatgaatgggagtactaattcagtctgaatcgacatgagaacaagcccaatgtctctggtggcgaagatgacgacgaggtatagatgattcgtgagtggagctggcttgatgagatgagcatgttgcttcgagagaagcgtgaagttgaatgtgtacttagggtatttctagagggtctagattgtgagttgaggaaggctcaacgggattattgtctgtccgagaaggagcaggggtctaggaaaatgatagcaaggaagggacgatgaatgatatccttgttctttccaagtcatagctcaggtctggggttattcctcttttgttttgtagagttgacaggaaacagggggaacggactgcttcatcgcgatagactaggtaatcgcaaacatatcacgctcatattacatttttcatggttttagaggctctaactggcaaaatactatgtaataattctcactttgctcttactttttgatgaatctatcgaatataactttcatatcaattgtggcttactctgatacggtcttacattgtcactatatttgaagtcatagaagtgtacaaacaatataagcttatgggtattgataccaggaaaacaatggttaggctgtactaacattattctattcattttatagagtccctgaattactatttaatatactacccagcacgttgaactttcaactccttcaacaaccacgatcacattggatacctactacaacccaagaacacaacttacaaggtatgaccccttaacccatggccaagatttggtatgaaacaatgagctatttaggtctctgattacattgcaggttgagcatcatcaaccattctccaaatcacagacatagcctatccaatatcccccaaccagtgagatagacgctgtttctcatccttcaaaaacagaggctaacaagcttaaagtgaccgatattcggcccattccgtcgcccaacaatgcatagctagaacatctagcaaggctcacaagccgtgcaaatcttcgcgctcgtgagtgccgaaagatagaccaggagatatcgcggattacgagcagcaaggaagctacaatgaccgcaaatccatacttccactatactcatggaaatgtcctagcggacatggacagagaattggcgtctctctgcagcgaacttagggatatgaagaaagaagaaaaaaaagaggccatgatggaacaggaagtctggaaccagattggttgaatgagaaccaaggcgttaagagtttggctcctataatggacaatgcccttcccggctctatcctcgatattatcacgtttaccaacagtactacgcattcgtttattcattttaatattccattagtagagctgtaaggtcaatcttctatgctggaccgaagcgcatatatcgtttctagtcagtacaatgacagtacactcaatagcgctactatttccctttggggtggcattctcacagatatgggcatttctggtatagatttacctatcatgagaagtttcagctccagtcaaattatcgtatgcctatagctcgcgtttgatactgagaactgaaaagctctaacaaatgctagagctatgtgacggctggtaactacatcacacggcagtctagattgaagtaccgaaatccactatctaggcttagaccatgaacttatattgagatggtgcaatatcagtgtctgatatgtagaatacaggaaaaatccggtaccatgtcatttctgcgccacatcaacaagtccaccagaacaacttgatgagaaaaatcaccacaaggtacctgtgtactcccattcgacaaccgctcaggaaccttggaaatttattttggttactagtctccattaggaaataaagagtataaggataagagatttgttgatgtttagattactgagtatgggaataatgagattggttgtttcataatgtatgcattgcttgactatccacaatatatcggaggtttatctgttcattgcctatcaaaatgacgatctccttggccactatgagcacctttttaacttcctccaggatgttctttgaaacaacaaggaccgccagtacatgcctccatctctgttgaagtcaatgcatcggggtggcggaaagtggcaatatcatgggtgtagataagtagtaaatcgatcgtccaacgaatgctggcttcattaagtagacttttggagcgggcggcatcgactttcgttaggacatctcacaggatggagctcccagcgaaagtgcgtttgataccacgaagtcgacactgctctgaaccagtcagactatttccagactggagtttaccagcaacatctggtgagatggtatgagatatcgacaatgtatgcaaatttttcagggtcgctgcgaggatactcggggaggcacaatatacgaagaacatatcgtacagtttcaagcactgagctaccataggtagtaacttggaaccctgttcataatcagaaatcagcttagctcggggacatcgataataactggtgggtcggctgtatcaaccagccagtgcgactgagagcattctcaatttctgctcatttgttgaatttgacctattcgaaacagatccattgtgtaacggcccgatcaccttgatggaatgacaggcagagaatctgctggagaacctacattcattcttccaatccccactgcaagacactgatactgaaaggcgaggcctattggaaccccgacttgtgcgtgcgattcgaggtgtctcttcgagcatagacttgtacttgctctagctcctccagatggactggatgttcctcacttctttttcctcagcattttgtttcaatgcagttataaatgcagcacagttgtaacttactgaccaatctatagtaaatattcggactcttagtggttttatataatgaaggaaaacgggaaatgaccaaagagtaagagagcagggaagaaggattgatttctaaaagaaaaaaaaagaaacggctaactaaatagccagtggaagcctcacaaaccaggtatcaaggcatcctcaaaaaggaaaatccctagttaggtactccgtacagttcggattttcacacccaccaccacaggcttagtaaatcagttgtctctagttataactgcttcgcttcgctcctcaatgatagatatagtttgaaactgccatagcaaagccaaagttgcgagtacattctcggtcgaagcatatccagaacccagattgtcaaccccctcttcttccttctttcttcaacctctcgcacttccaataatacgcctcccaccaaaggtcagatccctcagccccatggctaagactttcggcgaaacaataaactaacagagactaatcttttgataggctaactaccttactacctccccagccagagaggtacaccccgcgatgcaccgttcttaagcgcggttaaaacataaagctaagaaggagacagtcactgatgagaggccaatcctatcaccgagcgacgagcagctataccagcttgaaatagctaaggcttcgggataacgagctcatcttcaaggaatgttgctacgggaggcgatataccaaacgggctttctcgagaatttccacatacaaccgaattgtacgacgagacccaagctgaagtgaccaccaaccatgccgtgctcaataagggagtgcgtgtgccaggcaagaaatggtacgatctgaaagatctcgggaaggaccgacggaccgtccttgcctgtattccgtccactgcgattggttccagtcctgcttcaaacccacaatccgattcccgaactgaactcgacccgaccaatcacaatggtcggccgcgacgaagcccgatagtctttcccgagagatgctccaaatcagcctcgctgatctcgaaggggaaatagtactgatgatcttactagatatactcttgggaatgtttgctatcgggactctgactctctacctacatcatggggagatacaaatttcactttacttttaccttttattaagatcatgttttaacgagcccatcaagaatcatttcgctatcaattatttacactgtatatattcaatcaatatacctagcttccaagagatcaaaatgatgagaacggggttgtggctacaagcattgactaggctttcgttcctggggcagtattcgcgcccactccttcgcgtgtttgttggaagatcccacacaagattcttctcttcttctctcaacaaccttggactgctctacatatactactgtcaccacattgcaacgactcaaggtatgaatagttggtacataaggaccatttgtggtgaaagaataatctaacattagtaatgttatggatcaaactttatcatacctttcaaggccgcaacagtcctctatcccaccctgctaaaagtgagatccacgccctcatctcgatgttgtattcctaactgtcttcagagagctgacaaagaaaagtggccgatagtcggccgattccgggcccgaacaacgggcagctggagatgctaacccagctgcgccttattcggaccacgctagctcactctcaaagaacgaaaatgcggcaggcaaggatggtaattcgccgagtacaacttctgacaagccaatgtgccgctaacggccaggcctctactcctcacgcattgtggaggctcgagcgaaggatacagtctctatttcgcaatatcctcaggttacaggctgaacaagaggctgcccgtgagtttgaagtggagatctggaggaacgtgcgataagtcaccaagtcaacgatctacagccctatagagccttgtgtggatcacaatatcaacattgaatatcggagcaatgcctctttatctttcattggttgtttacctttgaaacggatgtagaatacgagagaattcttgcattaaaaccggagagtaagctgaacgcgccttaatatgggctatctacatactccgtctttacaaagtaagtgctattgttaggtatctcagggcatttttaatgatataattgcagttcgaaaagtccgatgactctgactttgtgctccggatgaaagactgatcatgtatacattgattacgagtaccaaccaaaaccaatggatatactcctccaatatcagagcacgatttcacgaaacgattctacgcttgtcacaaatcacggcaaccctttcacctgcatcatcgatgtaaaatgccggaaacatattcttctgacactttaaagttcctcccaaagaaaaaaacccagattgaggaagtaggtgacaagcgagaaaattcctgggagatctatacgcgcgaaatcatcagcctacggtggatcatcttttacaaatttgattatattttacctctgttcgcattcttcttggcatagattgtaccctgagggcttgacatagacttacagaacccatctatcccgctctctataatgatttcgatgctttcactgtttggggcgtttttcttggcagcctgcagtttagaaggccgcattaaatctgtgattgatagggaaagatcagctgtctattggaatttaaaagataatgtgcgatatgctttcaaaggaaatgggtctgagcgaatctgtaatatttatatgcggtctactgtacgcgattgctatgctgtctctatccggagggcgcttcctcagctcaatatcagacgaattgtcgaatgtttacggatagatcattggtatggtagaaatatataattgcatatacattggtatacttggcatatctatgaactattattggacgagagcgctgtaataagaatataggatgaaattgcattaattatatagtggcctgtttgtcttatttgccttagattcggcccgaacgggggcctgaaagcccgcgcgggccgagaagtcaggcccgaagctcgacccatcgacgggccgggccgggtcggtcaaaacgggctttggagaagtctacctcaattcttctgagaccagtcctcaacaaaacgcctgtggcttgggttggcccctctgtcttgcattcaatgcaacgtgggacagggataatgccatagcagcatcttccctagacccaattttattgacccttatcgcgccaattatatttctctaagctgggtttgcctgacaaagctcttcttcctccattcgtaaaaagcaactggcttttaccctggctttcaacacaaggaaagaatataaatactataacccgagtcttccaatattcactcatcatgacaataatctatctccggttctcgaagaaccctgctcctgttgaagatattgccctcgtcaccaagactcttctaaacatcaacccaggcctagacgagaccgagcgcaccgaggataccatcaccttctcttctacagaccacgacgtcgacatctttggcgaaatcttcgaagaatggctgcattcagaacccccagtcatcacaacgtttcgaatgctggccgattcttaacggctgccgtcagcctcctgacattattcggatccgtgtcagcgtcggccctacctccccttctcgagcttacgacggactccgtggatctacagtctacatatactttcaactgttactctcctggcaaggcatgcagggggaatggggacactactggtggtgggtcttctacggagggctgcacgcccatcagtgcgaatggctgtagctagtattccttcaacggaggtgggcagttcaaactctgtgtctatgaaaacagaggatgtaccggtaacaccgttacaagtgtcaatggtggctcagtgacttgtcttggaattgaaaatgcgggtgcttataaggtgatcagaagagataccaactgctagaaaattcaggacatcaggctagccgagttccacggcaaggtgccttgcaaaaaacccatactacccgggatgagctccctaaagcaaggatccaatgcggttacttctcgtggaatgaggagctttataggcagttttgggtcttctacctctttgagctccaggctgtgcgttccatggctgtcagtttgatggtaaagcaatatcgtacccgacggaccacagctgtcttcgagggggttcaaatgaatgatgcatggtcgtgtttggggatcatctgcagcctgagtgattgtgaaagggattttgtaaattgggtcgtccacccccacgtcagcagttgaatctccttcaattttgagcgtgaggtggggtgtgtctggtctgttctaattagtctcttttttttagtttcaagggggatcttcttacattctgtctttcttggaatatttcacgaagggtagcaactgctgatcattgagttcttccatgtggataatttgccagacttgcgattctccgtgtcggagagttgaaagttggacacatcacatgatcatggtagggatctcggcatcagctaccatagccctgttgatgtttagattactgagtgtgggaataaaatgatcttagttgtgtattgctcaagactgtctatctgtctgttcgttccgcatgtggatcctcggccagatgcccagttccactcagtcataccccagattacttggtcatttcaacaagctccgctactatccatagagaatatatcatctatcttactgcgccttcatgaggaaggtatagatgtcactttcgaagggaaagagcgaaaccagactgatggcctcggcatttctatggtgatcttggtaatgataaatgaagccaagtaagctgcttctagtaatataatggtataacagaagggtagatctctcaatagaaaggaaaaggaaattgagcatgagaataagcagttgaaggctatataataggtcaatagaatccgtttgcctcaatgctgcctttagagacctctaactacggtgagcatatccgttcttcctaggcctttcaaacagcacatcttcattaccttaaaaccaccttgtctgatggataatagaattatatacaactcatcattctttcattcataaataagttgcgcagtaaggtgaatagcagtcatagaactcttagcgctgtacaaacgagttcttctatagatcatttgattcatactgacatccatagacctgatcaagtgaagaataaggtgtttacctataccgcccccaatgaaacaccatactctctcacttctgatcaaacacacaacacttgccacactcaccatcacacaatcaattgaactttctaccatctcaacgcgattcttgtatgcagagatctcacatgagcttcttcctttctacaaagctcacacactcccaggataccactcaacagataccatccaacatcccacccactcctctacaatgaaatacaaaagacgaggaaagggtaaaccaaatgggcagcagccccaagacacgggccaccactgcaccgtgtgcaaaagccggcaattcaagacagagcaaggcctgagtgaccattttaaatgtcaacacgccatcttcccatgctctgactgcaacgagatctatgcggctgcagtcgaactagccgagcataggtactcagcacacaacaagggaaccttcaacaaacgatacagggtatcacccaacaaccacttgccaactgccaaaggcaacgcaacaagccgacctagggctgcttcctcgcctgccataccaggcttcctctctacaacaaaggtgcctgtgcatctccgtctcccaccttcccgcactcgctcagcttcacgcgcgtaatcgcgtacctttcgcacacagttgtggtccagcaatgcatgtccctcaactacctaatcaagtcccccgggagactgagtaggggcatacagcatgcacgcgcgtcttccgaccatacgctagggtcttcggaccacgcgatgaatccggtcaagacccctatctatcaatgcagggccatcaagtccccgtgggtatgggcttctatccaccgcccatcgaaggccttcaccacctggtgcaaatgtaccaggttcccagttaggtaggatggcgattacgattgggatgtcaagcacccccacacatctaccatacaatgcacggggttggggcttgctaagccgggcgtggatcttcaagatgcacgtgccgcgctttgccagtatataatccaggtcgcagtgcaaatcgaccacgctccgtaccacaacctgtgaaccctggccctcgcgctggggctgggactagttcatgggtgtggtgctggatacgttcgtggaagccgctgaggcatgttttcctaatttccccgcgcggatgatgttgcctctgcccgcgcgggtaggcgctgaagattcttacgcgcgagctgctggggatgcggctgcggctgcggttgtgaggaaaatcatgtgctaggcggtgcgcacgcatagctgaggctttgatatggtgtttgtgttcgctggagtgtctgatgacataggcggagtaggctgagtggggtgcggcatggtggagggtgttggcgctgaagatattcgcgcgcggactactgagtatggaaatgttgtgctaggcgatggatgcacttccattgctgaggctttgatatggtgtttgttcgccggagtgtctgatgatctggctcgatgtgactttgagtgtatggcagcatggtggtgcttgcactgttgctgtccatgcctggtcctaaggcactccggcgaatttacaacgagggtgtggttctcgggtcgctgtgagcgaaattatttatccccgtactgatcgttgtctctggtcgattcgtccggctggggtggtggatcatcacgcggattggcagtggggatcacagtgatgttttgaattgtttgaatgaagaaagtcaatttcattgtctcctcgtaggtgaaaagcatgaaaagaataaccacctcctgtattactatgtagaaaaacaaatgcgtaattaagtatggtcactattgaaaacagtactaaatcacaacggaaacaaaagaaagaaacattgcaatattggtgatgggggaattaaacgccaactttacagaaacaggtaagaaaaagacagacaaagcacaagtagacaatcagacagtcaagccaataggagtatgactgcttgaaaaaataaagaagcaaaacacttgatatagatatgagaacacctccattctctatgcatgcatcaaagagcctagaaaccaaaatccagcgctaaacacctcaatccagatggatacataacaagggcattaacgtgttcaaagaatactccgactggcctggctacggcctgcctggctgcgactagccaaactagcacggctgggagtcgtgcgactatgctcgtcttcctcgagaacatcactcagacgcgtgggatgacgatggcgtggtgtcacagattcccacccggtgccggggccccatccagcgccgctgtagtccgcggcggaggccggcgccggcggagggacggacgagggggcagaggtatatgcgctttcgggaatatagtgttcgtctagcagagaatgctcatactcttcgctttcctccgaaggagggccaggtgggtagcttaaggagtcaccatgggggtcgtgggggtagggggcatattcttcatcgcccgcttcgctgctgccgacgtaggagcgcgcgtcaggttctgaggttgcggggtaaggaaccgttgtattgtcgtgtgcgtacagtggacgcggataggggacttttgaggtaggtgggtcaacctttttgggttcgatgaaagggtcggatcctacgggagacatcggcgtgccatcttcgtagtattgtccggcgctccctgcaggcttgccgtatgcgtcggtgcccacggttgtggctgtctgtccggggtatggaccctcgcgggtttgtgggcgagtcgtgttgtgccgactaggaaggccagaaaccataggcacaacctggacgtctccaacaagtgttggctctccattgcgcagggagtttgttcggtctcgctcttcttgttcacggcggccaagctcctcccaggcacggcgtgcctcctccttggagatttggagttcgcggcgcatctccttcagcagttcctcagccttgactttgtctttttcagattgctgggcggtagaaaacgcatcggctcggccttgtcgctcttccttgagctggcgttccaggtccgcctgcacttccttcgagcgttcctgctcggcacgggtgtcaaaaaaccagcgctggaacttgcgttcggaggaggcgcgaagacgttgcagctcaaccaccgcgtggaatagattggcaccggcggcagacaagtctgtaatctgtcgagccaattgttggctaatcggatcacgctctagatcctcattgttctgttcaagtttgcgcatccaataactggtgagaccctcccagtgtgaagacagcgtttcccatcgctcgaatgcatgcggaaacccaactcgtttcggctgctgaagagcctggggagcaccttgtcctgcgggtagggcctgggcggatttggagaacccactgggcttgggctgacctccaatttctgccgcactctgcgagcgaccgtgttgaggctgctgagcggttgtttgtggcggccgtgcctggtttgcttgccccgtgccaaccgtcggcggtgcggtctggtattctgatggcctggtactcggtgtattatctggtgctggccggtaaccaggcacagcccctgaagcgacgggtacggtctgggactgtccctcggggccccttgctggtcgtggggctctgattcttgattgggaggcgttttcggcggcaacgccagcagcgtactgttgtgcctgggcctgggcatatttctgggcttctgcctcagcttcagcctgtttttcctccagttgttgccgttccaattcttcctgttctctctctctcgcctcgctttctgctttgcggcgagcctcccgatcccggcgctgtctcatgatatctgtaggtgtcctcatcccactcggtggctgtgatgtccctgagatgggattctggggtacacgggatccgccattctgcccacggctattgttcacaggcccagcgggcccagcgacgcctaccatatctgacatagaagcattcacttcgtcccagtcggtggatagctgcagcggtccacggatagcttcctcgagggcgaaaaggattgcggatgcggtgcgcgacgagaccccggtgtttctctgcggccagtatgaggtatggagaagctggtacggatcgtcgattgtagacccgttgtcgtcggtctccgcttcggaaagggccggacgtaggtctgcgatgccactggctgcagcgcgttgtacagagactggggttgtacgcgccggctggtgtcggtgtggaactggggcgcgtaacgagacagctcgacggtggggcgattggcggacctctgcctgacgggggatacgccgtaagggacgctgagaggcagcgctggagggtctcagttgatgaccggatgaattagaagggcgttgaacagtgggctggcgttgccgcgcaaaggtcgtgaacgttgatgggtcgtaagagtcgtggacttcgtcaggggcttgtggagtgtgtcgagacacctctaagaatggtggataaaattgtggattgggcgacaatgtgagtgtggcgtcactgcttgaagcagaatagcttcaaagatcgcgatcgcaaaattatcgatcgctcacaattcgaggatttacagctccgacggctgtacagaccaatactcgatgcacaaggtaaagcaattgagagaaaagcgaaagcaattcgaaatccgaaaggtgaaaagacgaggaagggtcggacgaggtggctggttaattgagatggctggggctgccgcagctcgagctgcagcgcaccaaacgtgtctcggggatgagcgccaactcttcaagtccgactggccggattcaatgcaaactgatatacggagtaaagacaagaagatattagactggaggaagctgaagggtattccacgttctcccaaggcaggaatgccagcccagtgcctgccctaattgacccaagtctggactttccttccttttttgctttttgcttttttgcttgttcaggctattacgaagtagatccctagggccttcataggctgtatgtcaaatctcaatattgcaccgtcatgcgtccagatcccaatgtcgctacgcaaccaacccgggaagcagtacctcaataattagctgcacctgtactgaaccggtcacacggaccgctgtaggtaaatggaatgtccagaacatgcagtgtctgtgttgtgtatgttgtaggaagtccgaaagataggagaaccctggaaatccttcgggctacaacctgaaatggattcgaggcaattttagtttggctatcgtgccatggttggcattcagggctaacaatgatacaagaatagaactgaatattgtattatgtagtgatgtgttggcagaggtgctgtacgttcagtcgggcaacaatatatatcctggtctggctaagatatatagtcaccatgtcatcatcaattcaggcctaccgggctgtttactatttattacgggcattcatactcctacggagtcctaccgtctgttatatccacaataacgtcgtagttaggctccatccgatccactggctcgttctttgctacttctggaacgaactccattctccacagctggtaaccgtggaaagcgtgaccgtgagaagtaatgatattccaaacatctaggtacatctctacatctctacagcatattgctaattattctacttccaagattctccagtccatatactttacaagttacaacgcactgcccggcatttccccgcaatgacatcttctcgagccctggagtgacgatgacaaagcagcgatcctcgggccaaccctagaaacttggaaccttggaaggttgaaagctaaagatccagtccacagccagaataagccaaatggccggggccccaacacgccaaggtccccccatagtccaagccgggcgtcgcggaagcccccgaagagacccgtcacactacgcgggacgttaaaggggctctaaagtgcggtgcgaggtagcaactatcagaataggagagaggatcagcgtggaagaaatatacggtgactagttaaccacgtctatatatacccaccgaccccatctgggtgctaaactacacacaacagtgcaaatggctagaaactgctccgggggacaatttttgtatggcgatggtctgtgcacgacaaatttagcatacaaagtggaccagtttttcgaatccctaagtgactgtttgggaaccgtgaaaaagatcaacaggtctcgtagtgcggaaaatatatccggtggaatctatcctacgggagtacggaataggttcacatatggtggccttgtagaccatcgattttcaagcaacctgcaactccattggcattattgcacacatttagtgtataaggagtggatataaattctatcggaaaagcccttctcggccgcccgaacctcctccggtgcaaatcacagtggtatctggtttgggacattccatttcttcctacaatattgggggtagttacccgggcgataaaaacatatgcaatagtgaacacaacccctagctatccccaatccaaaacctcaagccaggagaacccaatacaagaccacaccgagaccccaacgagagacacacccgcgccctagaagcactacgaccttagaagtaatattaacccccctgtcccaaggcctgggcctcaggagcgaacgaacagtaagggccacccaaggaaccgggggatttgacacctcagtcgggtcggggaaagccttcccgcagcgtcgcggatgcacgaaacacgaaacccggacggtcgccaggagggagccgaaacccagtattgaggtaggtttcaagcatgccttgcagcctgcagccggggttcgcgggagcttgggtgtttgggctcgggtgtttcagtttctttgtccactgtcttgggatggggctattggccaataatggaagtatgttttgcaagatgctgccgcgggggtgatcattgagatcctctgggaagggatctgttctaggtctgtggattggggagatcgaattgtgcgatcgtgaacgattattttggattgtggttgaggctcttcaaggagtttgttctatcgagggagttgggatggatgttctggattgttgttccattgcccctatgtaggaaccagtgctcgatagatgaatgggctgtgttgcactcgagaacaaatctattcaaaactctatgtgtctgcactcaacatccaacggggaaagaatgtgaccgggaggaccggaggcgagggtttcagcaacgctgagtccgcggtgagctaatcgctcagagatcgcgcacagtgcatgaactgggcgatggagagctattgggcctgcagatcaggggtagtactgggggatgcgctgatacttatacatcggcgggatggctgcacttcggctgtagtacagcgggatgcatgcaagtcagacttttcgatggaatgtggggtttattggcttagctgaggatatgtctctactaggtagtttgttttattttgggctgctttagggcttgcagatttgccacgatgcagaatatagcgatttcggttgtacacaatatgggactgaagacatatgagatggagcgagatctggagttggatacggcgaacacctcggtataattgctggatcgaagtgaatttgtatgccaggtcagaagatgataaaaaagagttcctcgatgaaccaatggcagcacaatgtcagagttacagacgcacaacatttgtgatttgtcaactgtcagggtataactcagcgccttgggtgtccgaccacttctaggaaagttaggatggctcatccgactaaattcaatcgaggcatctaagaattaaggcaaaactagggagatactaggagaaataggaaaccaggaacacaagggagccaagtagtatagctcctttcactcctgcaaagtgcatccttgatattactaagatagaaacagcattaactaaagataactatctagccggccgccagaggaaaaacagaaataaataagcccatgacgtacgtgataggaggacgatttccgatatggaacgttgcgatatcgaattgtgaggctcgaattttaacgttaggaagattaggaatgcccacacagtgttaagccctaacagtgccaaagtactcctaaaccacagctaaagtgctgctcatccaaagtacaaagtgacagagaaacataaaccatatagatcacggcgatcggcgttagtggctgatcccgggaactccgcaccaaattggaggtgatatctcacattttcggtcccagccctctttctgcacagtatttttggagactgcagagagcattatttctttcgactttcgcttctgacaggctgaggacgatttcaaatattaaaaatgagatctggtggtacgaatacctcgtgtcacttccttggcttccataatccgtatcacagatcacagacacgcaggcaacaacgaacacagcacagcgacacagacacgtacaatccacattgtattcttcgggatgtttctcggtgcaggcgtacggatcaagttccgcgcgcccttgctgggggacccaatcgaagggtccttgctgcaaccccatccctacggaaggggaccatgcaaggtcagataggtcatgatcgtctgtgcttctgttgtttacattgtgcattggcatgcatctgcgtttcgagctagccaccgggtcattgttctaaggctctaggtcctcggggttatttttggtataaacatatccccttcaccctggcctccacttcggtcatttcattcctcattccatctctttctctcgtcctgtggcaattctgctctctagacctgtcgtactgtgcctagatcctagagatcttgctcactcgtgttacttctccttcatattactcgagctcacagtcccatggatcacagaggtctttattgtccaggcgagttggacgtgttgtatcaagatcggaacagatcagagactacaatttgtgtcccgtcgccctcacctgcaaagcgaggatcatcttactaccccacagccggcccaaaggtcctggaagagtcgaatcttgatcctttctacctcgaagaatcattggccgctacgccgtcttggaatcattatacatcggacatgcgcaatgatagttttgacgaaagccaatactatcccctttccttgaaccacaacaaggatatccggaacccattacaataccccggaccagatcgctccacacttgcacaggtggagttagagaacagcttgcgattccatcgatacactccatcgacagaggagcacagtccgctgcacagtagccagctgtcattcagctccgtgcaaacagatagcaccactcccgacttgacaccgagcagctccttctcttcttcctacgattcacctaactgccccgacgccgtcttggaggcgacccagcagctatacaagcacgcgaaccaggttcagatcgagcctcgtcgccgccgcttctatctgcctgcatctacaccaccaacatactctcttcccccgccacctcccccgccggtggctcctatcaaccaagatactttccagcactcaaacgattcaactactaccatcaccatggtctacgaagacgtaacaggatcctgctcatcgcggtcccgccgcaggaagcagcctcccgccgttctcgatctgtcgcgtacaaccagttccccaaccagatctcgccggaagcaatccagccctggaactcgccctcctctggatacttctatgatctcccctccatgcttgatcaacccaattaccatggagcctcacatgacccactttgatcaccctctcttcattcctgccaacgacggccctagccccgttcctagtcctgtggctagctccccaccaatctcccgccagtggaccgcaacctcgatggagcggccctcaatctccactatcgacatgttctgtgagcagtccgtatgggagtctgactccgattccgagtctgctggtcgtaaatccatgtcccgtcggccaatagacaccctgcgcaaggttcgcagtcgtgccaagctccgtgccgctaagtcgcagccgagacttaaccagactatgcctgatggcaatgtctttgagcagtttccatgtatgccagaggatatcttgggagagcctatccctgaagctttccgtcctagcatggaccgccccagcactagcaaagaagctgtgcggacacccatcgggctgcagacattgcgcctcgttgacccttcctccacctctctcactcgccctccccgctcccgcaagaacagcagtctcaacagctccgacgttgaccgctccgcagctgccgctttccaagcccagtttcgccgtcgccagcgttccgagtccactgaatacaccaactctgacaagagtgacaaggagaaattgacctcgttttgctacgatcacttctcctcagcccccatcaacggatctcgcgaacagcgccccctcttccaacgtttcatgaactccctgcgttcgttgaactgccagaagccccaaaagtctaagaagaccaatgttaccaccatctgatgcatttacactcggcgttccggttctctgggttcaattttaacggaccaaactatgatacaacataccgacttgaccaacgatccctccaacgatttcataacattgtcttcatgcttccaatgtgtctcgattatcacgaacacgtccattctctcacgctatatctgattctgcttcccgcgcacaatgaaaataatgaatctccagacccgactgtggatggacatagacgcgctcaaccacgttctttacatgcgctatctcgcgccacgaaacgaacatcacgcctggtcctacggaccatgactaccgacttatgactcgataccctcgagctaactatctttaattttcctacctgtcatttgcactctttttctttcctgtcttgactgcgcctcatgcgtgctgtattatcatcgctctgtctaattacgaagttactatttcgaacggtcttcatttttaccatgtctgactgaattatgtctcgccattgctgctacgacaaccaatttttttattcaccttgtgatctataattacaaactagcggaacacgccttttaggtctgtgtttctatgaccaaaaattgcattctctgcactcttgcattcatcaaaagtcgttccactacctcatactctatgaatagacaaaaatagagaccatcacattttacctcaatcatgaatgatcctttgttacttcgttgcctaggggacgaggccgttttctggaatgccagattgcgaatctcagacgatccccaaaggtatctcgaatactacagagtaccgcaacctaacctccttggacaacatccatccgaccgagtaatgacgaccaacaagatctcatctgcctagatagacacgcctcatagcccacgccatgcacggggacccaatcacacccgcaaaccccggaccaccaagggcgaagggagccactaaaccttgccctagaccaggacgaaagctggcagattttgacttgtgcctccgaacgactggctcattgcacggacttggatagcccgacgcgccacgtatgtactgcgttgcgtcatggtcattcctaatctagaacaatccgcagattctctttcggctgtttcagaacactaatatactatatagcgtatccagaattccgggtctggtctgccagcgtggggacactaatgctatcctgcttacctgtcgaattctcgatgcagctattcgtatgtttccccacagcggctgcaccggggaaccgcggcggggatctactggctgcggaggtgggatgctcttggatcgacatgtcgaggcgcgttcggatttgggtacttagggcttggatgccaactgacgactaccgaccgacactcgcgcctcatgtacatgcacaaggcccaactcatatcgaattcctctcattcaaacacaaaaccttctaactagtgcattcacaaaataagtgtctcctacgcacaaaacccaaagaggataagacacatacatcccttgcatgcgcccctcaacggccgccaagcatccgagacctcgaatctcacctcggctgaaaagactcaacggatacttccacctacggactactttgctccctttactttgtgatagaagcttaaatcaagcctaacaatctgacccgccagacaaagctaagcaacccgtcctccttcccgtctccccctcaaccctcgatctgatatcacaagtgcattctctcctctccaatactgctccgtactccaacacgaccgatcttcaaatccccactttgacaggtagcgctagacagggattattcgagccgggccaaatatagatatctccatcccctgggccggggctcttccgtggccacctcacacgcaaggtcgccgatccaccggctgtgggccctttgcatccccgagacccgccagcttgggcgggtttcagatctatcggactttgggctgtggggctagagggctcgatttggtatcgcgtctagaccttcgtgctgttttgttttgttggaggtgcttttgttttgtgcgattacacgctataagatgtgacatgtgactcgtcatttctgcctcgtgtttgacaggcgcgatttgcaggttgctttttttgctctgacgaattgtggtctattgtagactacatcgataattgcgctggtggctatcgttaaaaattcggcgaaatgtcgctgaattcgcagaataaagtcggatatctaatccgacacgaacaccaccatggcaacagccgtgcatacagtagtgggcagagccccagcgtcagtgtgtcttagagaagcacgatcattatcccaagcaaccgagaacagtaggtcggaccggccttccgcctagcccgtccgccgcatcaaccttgcagtggcagcggagactgttccaaggctctggatactcgcatcaccgccgcaggggtgatcctgcggcgggggacgnnnnnnnnnnnnnnnnnnnnnnnnnnnnnnnnnnnnnnnnnnnnnnnnnnnnnnnnnnnnnnnnnnnnnnnnnnnnnnnnnnnnnnnnnnnnnnnnnnnnnnnnnnnnnnnnnnnnnnnnnnnnnnnnnnnnnnnnnnnnnnnnnnnnnnnnnnnnnnnnnnnnnnnnnnnnnnnnnnnnnnnnnnnnnnnnnnnnnnnnnnnnnnnnnnnnnnnnnnnnnnnnnnnaggggggtggccgggggggggggaacgagcagcggagaccccgagagacagtggaccgcactctgcaggaactcaatcctgcatttgcacctgcaagacgagaggagaccttttccctcctgcgtccctgtacctggaggggcattgttatgtagatcgccagtcaagcacagccagccctgtgtcgtatccatgacaaagacatagtgcaagccgtgagaatatctgcacaaatccaagacaacttcaactgtgctccacagcctggccctcgcccttgcccttggccttggcctcctcttcttcctccttcttctccttctccttcatctccaaagcctccatattctcctcccacctcggaacctcaaccctcccctcccacctagcaacaacaacatcccccttccgcccaagttgggtctccgcccgttcctcctccccaccctccgctctcggcgcaatctccggagcgccatccgccccagcaaaaacagcctgcacatccagctccttcagcgcagcttcatacagcacccggatctgctcccttttctgtcgcctcaattccccaatttcagtattgccatccttatccgtccccgtagatgaagcggcagaatgtcccgtccgcacagccggcttcctcacaacacccggtccactccgctcttcgaacccgcgtagtagtccttccataattccgagtaccgtaccggcacgcatacccagttgcgcaccgacggggaagcctccgtcgaagccttcttgcacgtgcgcgcccttggaggcggacgtgccgtcgcggtagcctgctgtgacgtgttggcggcggaggctggggagatcggagggttcggtggattgggggagtgggcttgtggctgatgggtgtggtgcgttgagggtgctttcgtatggtggagaggagccgaagatgtcgtcgagggagttgtcgtccactgcggggttgtcttgggttgacattgttgttgctggggagggtggggtggagtgggcagatgatgagtctgtgtgggctgtcattgcccaggtagtatgggttttgacttcggttatggcttgcgactgtagaggtgtcgtgggttgatctgagtttgtgaggtctgagttgaaaaaaaaaagatagcgggtcggcggggcgatccgttgatccacggaagtatgtgtatggagtttattttggagtgtttatgacctcattcaacaagtttacatcatatatatctaggttatatagatatggatacttatgtgaacaataggactaatatggtggaatgtacaggtgagttattcacttcgaccgggaatgccttccgcctgatctaagtgaagagatttctttgctgaatagtctctccctattgatcagatgagagttagcaattgctgcgtggaaatgaggctcttcagaatagggcaaaataggtggtcacgtacagttctgaagcttttgagcgataacctttcttgcaggcttccaaaataactccaaatctgcacctgggcgaggtttagagaaaccaacctcgacgacttgaaacacatccttgctagaaccttcgattttatcaacatctttgttggactgggtattattaaatgcaatgaattccctggttccgacccgaacagcattcagccattcgagttgttgctcattgccataaaaggcttttgacataatttcccaatgaaaaaccagaaaggccaaggcttgttgaagtcgtaaggggttccagagatggactgcatgattgagtccagtctcttgtcagaaagccttatacaagatgagattcttaggaagagagaatacctggagggagatgttgcttactgaacaacaacatgagtgatatctggtagcagtttggaatttgtcctcgacaattatcttggctgaaggaactgggactgttatggcattatgatccggcagtgtttcatccattgtttccgtactctgtaatgactgtcaaatcgttgtctgttactccgtgcttactcttgagtgttacgaggatacctacacgtgaccaatattatgccttgttctcaatttcggttggcataaggaataaatcagtgtatctactgtcactaggtcaaaattctctcgaacgcaacccggcattcttcagatgggtttcttttctacctcgaaccgtgccgattccttcattgcagccggtacaacctcaacaatatatgccgttgacgaaaactttgtcatcaaactccgtccctcattaggggattttcagcgccaagcttacgacactgaagttcgctcttacaagcgacttgggcaccatggacacatcgcatcttgcgaagtaaacgaggaaggtctcctactggaacgcgggatttgtcttcggaccatacttcagagtgctggaagcacttccgatggaccgtcgaaagccagggagtctccgatctctttagctacgaaacttcaatgggcgcaggaagccgcggatggtcttgcatatattcatagcaagggtattgtccatgcagatattggttgtcacaatatgactgtggacaactccaaccacgtcaagttcattgacttcgctggttccggcatcgacagtgaagccccgttagtctgctacgagtggttcagcttccaacctggtaaggaaatcggtgtatgcacggatatatttgctttcgggtcaatgctgttcgaacttgaaacagggcgtgtcccttatagcgagctggaagggactatggagatggggaacctaattacagttgttgagaacttgttcgcacagcggcagtttccatctgtggagactttggccctcgggtctgtcatttctgcttgctggaatggcaaatacaattcaatggaggaagtccatcgagatattgcgtgtcaaagtaagaattattcagagaaaagcctgtaaggttcggctgttgtgagttggtctaagcgggtcggggcgatcaatgaccaatgctatgttgggccatcttttgagactttggcccccaagcgcatcagatgatgtgcccaaagcagttagcaaccacaagcctcatgttctccatttcgatttacatgaagtctcctaagtgacaaattcacagccatgtccagacgcaccctccgtctcctaggctacaccaccgccgtcactggcataaccggctacagcatccaccgaggactaagccacctggaagaaaaatacccagcacttccccccgcagcaggcagcagagccctccgcacaccggagcacccaaatacacaacgctgcgcatataccgacatctacgccgcccaaataccgctacaagccctcgaagcacgcatcccaagcgccaagacatcatcaaaaacagagctcgagtatgcctgggctcgatccgtgctcgggagcaagctcctacgagctgagggctctatcctcggactactcacgagcttccgcttcacgccatgcgatacaggcagctcgacaggaggattctcgccggatgaaaccaccggtgcgcctcgcgttctgctgaacggtttatttcaagtacagcgccttccggccgctgacgcggatagcaatggactgctggtctcgtcggaattgcccgacaagccccgcgtgttctttgagatgattgcgcggtgggggtatccttggcgcttgatgtcgcgtgtgaagcatgagatgagtgtttctgagccgttctggaagaatggtcaggggatgtttgttgaggtgcggtttgcaagtgcgcatgattatgagattgtggatgtagaaggtgagcttgggaaacagaagattattccggattggactttgagactgcatcgtggatatgctaggttaattcttgattctgctgttcgagaactgcaacgggatgttgagaaatagtctcgctttcgtattgggctctcttttatacccttcgccttccaccttggagagctgaattagctgtgggtatacctcaggcctgctaacgtcggacactttggtttatgccgtaatttggtatcagaagatctattgtacactcccagggagcaatgcgacagccataccttggacttgcgatgacattcatctcgtacttagctcttcaacaagcactatatccaaacttatacacatttatctgatacaccatatttaccacgcggtatcaacatatctccaatgatcaaattctactctattcctcgccttcatcgtcacccgcatccgaaacacaagcactcccatttggaacaacggtccacgactcgaacccattgtacaaataacacacatcccagccgctggtaatgctccctagcagactatccgccccaccggagcaatcagacgagctgaacatgcaaagatcataccggttcacgtcggaggggctcttccatgagagacttttgacattcgttgagttgtagtaggtagtatctaacccctgacagtcgagcgccctcgcgccggagtagtggagaatagagtattggatattgttcacggagctgttgcaggccgggggtgctacgctgaggaaacggaaatcccactgtgaaccattagcaggtttgatttagcataattgtcggaatccggcgcgtttgacatacggctctgtaggcaagaactgtgagatcttccgggttgggtagtgcgttgacggtccagggagcgacgctaatgagcgtcaagcatgtaaggaatttcattatcttggcagaaataagactaaaaagcagggcttgggattatgcagatataaagtacaagctggagggaaatgtttatttgagatattcaggacataattgcttcttattatacggagtaccaccactcgccatcccattcagactattttaatctcaaacacctctgcacctgcagaagcggagcctgtacctccaatcacagccatcgacggccaggagagactcgatcggctcgatggccactcctttcagctgcagccagagagcagctgaaagaacatggccaaggagaagccaggacggagtaactacggggtactccacagaggggtctcgggtgagttttctcttggcgggggaaaggcacgatgctgttgggctctcattgggcgcgatattggcgagaccctggttcctgtgttcctggagggtccgatcggatatcctgcggctcacctgatctcggtggaataggatgaggtatattgaggttgttggatactcagtacatattggttgtctcgccgatttagaaggatgagcgttaacttggctcagggacgactggacgggattgtgtgcccagacatttatcgagacaccgagctgaggaacggcgaggaaaggaagtacaaaaaccgcgaaaaccttgaaattggacaaaagaagcttttttttttttaatatactatctttccggagtaacctacggagcatacaataatgcatcatgcattgtgcttcgtgacaaaaaccatacgttggtccttcaggacactgtaataacacccaagctggtgagaaagacgcctcgtctaaattatttatctattcaatctatagaatatcccagacagatggtgtacaaagacattataggccgtcacaacacaccaaaaccacggagaactgtctcacccgcgctggggattagacgtcaaccgccaagcccggagaggcaagtcctgtagcttctgcgcagccggcttgataaacataatgaacgtgagcgtgccaatgagcacacagagtatgttggtcatatagtacccatcacggtcgatgtggcaggtaccgccgccgttcacgcagcggttcttttctggctcaagggcgcaggagaatgccgtcgtgataagagtgtctttgagagaatcggcgggtggggcgatggttgggggaagacatgttgcttgggtgaacatgtcgacgagtttgaggacgaagattcgggggaatgttccacccaggttgcagacgctgagatgagatgttagtaatgtgtgcatgttggggggaaagggagtaggacttacgttgcgaggagggtcatgtacgtcccgccaatggctgggtcggcgattcgcgcgtggaaggccgagatggccacgaacatgaccgtgttcataaaggttgagagaacatgctcgccaattaccgtgagcatgtaccacattggcatctccgaggctgtgggatagatcatgaccgtgaattgagcgagcacggcggctgctagtcgtccgataaaagcccagccccagaggcgcattgctccgtaattggttgaccactggccggcatagtagcccagcatgatttcaaatgggaagtcgatcaacacgaccagggccatgttgtcttggccaaagcccttgtcgaggagcttgagactagtgactccgtcattggcctggaagccgatcttggcaatgaggtgaatcaggataatggtctggatgttcttcaacttcagaacgctccacatgcttttatacacatccataatgctgtcgcgttctttgctgcgttcttccttcttgaggaaggccagaccacacgtcacgatcagatacgcccagccccagaagttgagataagtgccgagagatagcagaccttcctcgccggggatagtgcggaaccatctgttcgcaaagtccttggagttgaacgccaagaagacagtgtaggacaggaaatggcccgccgtcaacccgaccgtttgggcggtcgaggcgtaggaaatgttcggtggggacatcaaagtgatcgcccatccatctacagcgatatcctgggtggcacagaaaagcactagcataaaccaccagtatgtgaatttccagacgcccgcgccattatccgcgccggcctcgatcatcatattctctatatggctacccatatagatcatagctagtccggcgatcacctgcacgggggtgatccagctcttgcgccgcccaaagcgcgtactccacacggcatcgacaataggactccagaataacttgagcgagtatgggtatgaggcgagcgagaagattccgatctggccgtatgagaggtacggcttgagcaggaagggtacggagccggtggctaggcccatggggattccttggaggaagtatagtaggaccagcagcagaaaattgcggcgatcactgcgcggtagattgtggaacgttgtgtttgtctggattggggtttgcggcaccaggtcgttgtcgagggagaagctcggtcgcgacataagttgggctgttctatcggctgaggtctctgcggagggcgtatccctcctgcgcatttcgatattgttattcatcttgccattcgcacgtccgtttgacccggtagagactgtcaggttcgctttggaacgccgcttcgagagggtcgcgtgcttgcgtgtcattgaatgctgtgttatggtagggagcgatcgcctttgtcagcttcggcaacttcgtcctgattggatcgaggactgaagttgggtattatgtattgaatggtgaaagggatggatcgagggttcggcttcgaaggggctgcgggtttagatgctcagggtgtgctgtatgttaaattccactgagaatgaaggagtgaatgaggaatataaaagaaagaaacttcagcgaatctttagtgggggatcgttgaaccgtaggatgacaaaaaacatgaggcaagctggcctcttggctggctgcagatccggggacccgaggggttctattttaatctgcctggatggaaaatggtcgatgggaatggacacaatctgagtctgagtctgatattgatgtttttgatatgtatattctctcttgtaacacaaatagcacgttccctatgaggtcaccacatcaacacggtaggactgcaggggtcagatctataaacccaaactccaatttaaacacctttgaggcttagtctcaggatttcttcagatcttgcataagaaaagaacaaactgatgatctcagcccactccgcccactccgtaagcccaagcttctgcagaatcgcgtcagatgttgatgagatcacgtgtcaaaataaactatgacaacataaggatcagaatcaccgcgcgaacctcaccagctccccaaccaatatccaaaatgacatctcgcgttcccacatcaccagagccagaagaagtggagctagacacagaaatcgcctcaatccgcgcagaaagtaagcatcccaatcccaatcccaatcccaatccaagctaaatcaacaaagtccaaaccctccgaaaacgcaagcgcatcctcacatccagcctcataacaaccgacacagttcaaaacctcctcaagaaacctcaacccccaaccaccaaaacaaccccaacagaccccctcaccacaatctccccgctcgtccacgccgccggcgcccacacctcctcaaaccaccaccgcatcgccttcggcgcaaccgccttcccattcaaagacccatccgcaacagccagcgcgaaacccctcctcggcgtgcgtatcgacgtatgcacgcgcaatggccgcttcgcgaaaccatactacatcctcctcaaacaggagcggggtcgcgcagggcccgagtcgggtcccaagatgttgaaagtgcatcggcatacagtgccggggtttatatcgatgtcgaagctagagggtgtgtatctaccgcggcctggtgtgatgcgcgacaatggagatgcggatggaggttcatctggcggggatgaggatgaggacgctgaacctgtgaagctggggaagaagagcggccggaggcaggatcttcgcgggtttgtgcgcgagcttcggagggagcttgttgcgtggcatatgcgtgttgatgctgttgagttcctgcgccagaaattgggccttgttggtgaagacggcgggtccttgccgtttgatgtttcgccggatcgcgatacgggcattgtgtctttggctgctgttgcagttgaggcgcggtatgtgcgtgttgagtgggttgatgggcgggttgggcggttcaagttgtctaatgctggagtcgtggagcgggcggttgttattggtgatgagggtcgggataagaaggtcgaggatgcgatgactggtggtggtgggcgggttgagacggttttggataggttgagggttgatgtgttgtctggagcaccggcgctatgagatgttgttttactttgtttttcagcaagagataccccaatgtcaattttgaatgttcgaagcaaattaacttgaattccagagcagctaaattataaacaggttggtatatctattcaatggtctccaccaaatgctacgcaatcatgagacccagaagccgtcgtgatgcgtgaatgtgtactccgtacgtgactgtcaattcaaaagcagaaagtttattacaagggcaaggggcaacatggacagaaggatggggtattataagggtatatagagtagatgtcgtgtcgtcgtctccaattagagaggcacacaatccttgggatggattgtatcgggggttgaatcgggggttgaagtttctagtggtgagcgttccttaacagaaatgggggtattgggggtagtgaaagcgacaagcggcaaaggaccatatgactggccatgtcgcacctcgagatgccgacgtagcacagcctcttccaaataccaacggtgccgtagagtcgtcttcttcgtttccagagcttgcatgagagagtttacttctcgttggtgctcgagctgcaaggccgcagcatctttgatgtgtcgtttacacatttcatccagttctttttccatacgcgcggtggcttcctggagcttgagctcttggcggtcacggaggactttgatgcgggcgtgatggagctggtccatggtcttgtgggagtggtattgttgttctagctgctccatgtgtcggcgcgtgagcacacgagctggcgcggtagagtcggattccgagagagattccgatgaccgttcggatcgttcggatcgttcggctctgatcagtgttccggcgggagatggcggcgggctggcattgcggagatatccttccatatgcttgatgcgggtgcgcgagttcattttggcgcgatcgaactcgcgttgctgttcgatttctaccgccagctgtcgctcttcgatttgggctatagcttggatattctgcacaaacgcttgttagtaaaaataaattaagatcccaatgtcgtaaagcgaaccttttcgcgtttctcatcctcctggcgctgattgtcagactgttgctccgagacagcggtctggtgccgacgccggagggtacttagagcggcgtgttggaaagcgagatgtcggttcctttccatctgatgccgctcatgcatctcgcttaaatccggatcctccagacttctttgtagttcttctttgctgaaccgaggtatttccaaccggggaagtgttacctcattgctcgcgtggggtataacattttcatgggcagcaatgacaggttccggcttgggttcgaagaaaacatgttcaaggtctttgtcgctcgtggatacagttatgcgatcttccgaaggcaagaaaatggccgaggacgtgcgtttcttgcggaaattaatcctcccgatagcagacttgaagctgctccgtcgcctccccttcttgtcgtccgacgcgacgctgagaattgaatgccgatgcaagttggcaaacggatcattataccccggcgctaaaaggcctgttctcccctcactggagcaaaacgaagtcgggcgcgtagacagcgaagccagcgatcgcgtactgccagtcttgatgcgatccgaggaaagcgcgacatccgacagcgaggagacaatatcatcgagcacggatggcacgggggaggacggctcgtgggacggggtgacggagccgcacacagaattccgatcggtcgacgatccagaagacaggactggcgaggaaagatcgaccattcctgaggcgatcgaggcggccagtggcgcagaagctgcgatctctggcactttcagacccagttgttgagcctcctcggctaggtgctgcgcctgcgctgcctcggattccggggaggggtggtggaggacatcggtgcgatattgggcctcatcgaagatgggcccggtgtgtgactccattgtatgtacaattataggaggtatgtggcgcctaaccagcgggcgcacatgaaattccaggtccgggagagagctaagaataataccggttccacatggatgcgttctatgacggcatccagggaatctaaggatgaggggttgtaaggacagtattaagagttgaagggtggaggtcagaggtccaagctaaaaggttcggggccgaaaagggtagaaaggggaaaacaaagcgcagacgacggttatggccgtttccttgtttcctcatgtttggtcgttttaggcaattttgggaaaaaaaggaaaataatcacctccgacccacgggtggtcctgacgccatccatggttctacgccggggatcgcagtgaaacgggcaattgcatgagagatcgatctagctctaacggttatatcggctttatgctttatttacacatccctgcacctgcattcccaaggtatacgcttccatacgctggatcccgggcatccctacggatagataacgcccctcgatccaggccatatgaagaaggtagggcttagggctacttaaattgcctcggtcccatggaaaggacggatcagcccatagatcaggccatttagagacctcctatctaggtagttcaatacaacatatgtatgtagccaaggaataaccctactcgttcaacatgtcgcatgccagttgataggcccgctctttagcttggtattgcggagtccccgccctcgtctttttatccttatcccatccatgactacaaccccgcatgcgctcactgaccacatgccggcctggcaacgtcttgatcctctcagccaattcctcgccctcgggtgcgagagtatcaccatcggcggtgatcataagaacacgtcgtgggaatcgatccgccggagcataagtcggtgaaatgcgtgggtcccgcttgtcgaaggatgggggtacgtagcagcggtcgaagaggcgcatgagagcaagaggaatgacgaaatctgcacgggccggggcgatctttgctccaggatcagagcctatgtcggtcacaggatagaatgctagcagggagcggaaggtctcgggagggaagaggtttgacgcagtcgccagcgcgaggttggccccagcactaaatccagacatggatactcgggtgaggtcgaattcatccggacgcgtgagcacgtatttgacagcgtcttccacgtcgttcagtgcggcggggaacgggtgttcgggggccagacgataggagacgtctaagacagtgtacttcgtttcctggctgattcgtcgacaaaatccatcgtcgccgccatggagcggtaccaagaagccaccctcgtggaagttgaggaggacgggtgacgggcctgagtcagaggactgatacagatgaatcttgatggttcggccagcatcccgggatttgatatggcggacttcatctggactggccgataccttcatggtaagacgcaccattgtgcgaacgagaaacacaaagcatttgttatagtagtacatgagaatatccatggttggcgtgagatgctgtatggcgtgagacgatgtagtagttatgttgaagctgagtctcaccggaggccgggatttgaaaggccactgctgacctcccccctcttctagtctattctagtttctgacatcttacagcccgtagatatccaattagaaatgattaacatgtactttttcttatttctacctaatatattccacccaattataaggcatattcaggccagaatctcaaggcacccctgcattacacagtgtaactttatccggataatctgataccttcatcccattgtttgcaaataatctacttgtataatctccgtgatgtgaaccatagctgttctagtgcgttggtatatctcaccgctcgtggcggtattgagccccttatcaattagctctcaattccccgcattaggacaattccacgcagagcctcattgccttccacgcacccgtccaccaatcagaatgaccggtttctgtcgtcacgctcatctccaacacccatcgccatcgcatctatcgttccccttttagagacccaagttgtctgagaaacaaccatcctagtttccaagcccacgacttttgagtttcattaaccaaacaaagactacttaatgagcttggacaggagtcctgagagacctcgctttcaacatcatatcatctacacgcgattttaggatgcccgtcaacactaatttcacagtcttcatacgcttaccatttccaagaggcgactttgtcgatccgccacctgcaagtctccccaaaaagacccctggagcatccactgacataaacaggtggaatggaatgcatccaaagatcaagcattatgggatatcctttctcggccatctaaaggtgacatagactgtatgtattggtgttgctttgagaccttgctttgatatcgctgacatcatcacagggaaagctctgtaactggactctgcccctgacactttagcttggagctgctaacacgcttgtttagggcagagaacttcgatgtcaccttgcagttcctccttcagcaggcagcatggctctatgatcgccagctgtcgcaggttcgggctcaaatgcgcaaggtcggcactacacagtcgaactccccttccccggctccaggatctgtgtctggtagtacagcattgggtggacagtcacagagagaaacaccagcaccaggtatatcctagcttgctttatgttctttcttgtctatggtctgagactgatgaccagcaggttctcgggcgccatcccggcaagtatctcatccgaaagatatccctctacgaggtatggaccgaaaccctacccgtcttcgcacaggccatttggtaccgccggtggatcgatcacgtttaacattgactgcagcccctgagaaccgacgtaccagctttacatcaactacgcctactaacctcacccgcggacctcgggaccctacacgcaccgccacgccgacaatcgatgacaaagaatcacgctgggattctttggctcaccggccttcggctgtgagacgagaacaaccaccggtcgcgtctttgcccagatcttcgccactcgaggaagagtctctgtcctcgagctcatcggaagaatcagcatccgacgacgataacacaaacagacgtgcacccctgttcaaacggtttggcaaattttctactcatcgtctacgggatgatgaggacgacgaagaagatactccagccttcctgcccctatcccgcgaacatgggcgtatccatcgggaccggtcaggccaggaactcagcgccacactccgtttagatgccgagcgagcagcggcgcaacggcgacaccccgagcagcggcctaatcctagggtaccggcaccaacggactcatctacaagctcaatcagctccggtggacgtagcagcctacccggtggacccaggcggaccagccaggggggatcgatgctgagccctgccgaacgccagaattcgcgcaagtccaccgcctccggtcgcgaagctagcgatggtactcccagcatgggaagcagcttcagtgacctcgacggtatgtgtcccaacccccaggattctggatttcaactgatcgactggtcagatgcaagtgttacccagtcagccctggaggaggcccttctaagcaacatgcagcatggtggaatggcgagtcggatgagcactatcagtcaagccttgcgcagccggtatctgcagtgaaatgcatcttacataggaatatctattttgacaggttgcactacaacgtagtatgtgtacaacatatgatgtagctcatgtggggtgcctgactgtgttcccgcatatggcctccacgtgaccgagtggcgcctcggcatctcggtggtacgttccagtgacatagtggcattatggatatcttcactttgtccggagttccctatactcagatattccaggtattcactgtcacgcatcggtcagacgggagcgctagtgccggatcaggtcgttcagtctcaacgcccagaggagacatatgatggaggggtagctcaacctagctacctagttacgtttaaaacgttgaatgttcaacataaagaactgttggatattgtgaataacgagattcttggccgatcctgaaaagctgaccggcatcaaagaacaccgactacaaccccaccaaggttaggacgccgagcggcatcctcggcatctcgtcgactacactcaccggcagttcttcgattcacaattgtccaaccccttttctccgttgcaaagcgtctataccatcattcaaaacaatggcacccccattagtgggcgacatgcccccagcggaggcagagtcggtctatttcaatgaataccccccaccaaaggcactgccacgccatgaagcgctcgcgcgcgcattcattgacctgcacgtggaggcacaccggcgtgtagtactcgtcacatccggaggaacaacggtaccacttgaagcgcaaaccgtacgattcatcgacaacttctccgccggcactcgtggcgccacatcggccgagtacttcctcgagcaggggtacgcagtgatcttcctacaccgacaatacagtctgctaccgtactcgcggcactacagccactcgaccaattgcttcctagacttcatggatgagaagccggcgtcggcggactcctccaaccctggccatggacccatcatggtgcgcgacgagtaccaagacgagatgcgcagcgtgctgcggaaataccggtatgcgaagcagaacaacctcttgctgctgctgccgttcacgacagtctcggaatacatgttcgagctgcgggcaattgcgaagctgatgcggccgcttggctcgaatgcgctcttttacctcgcggctgccgtcagcgatttcttcattcctcgcagtcgcatggcagagcacaagatccagtctggggagttgcctccgcacatgcagggcagtgcaatctcatcggatgaaatctatacgggtgagaatgaagaaaatccttcgcatagccggaagctcgtcgtcaacctcgaccccgtgcccaagttcctgcaccagttggtagatggctgggctcccgaggggagtatggttgtttcgtttaagttggagacggatccgtcgctgcttgtgtacaaggcgcgcgctgcgctgcagcgctactcccaccacttggtgattggcaatttgctttccacacgcaagtgggaggtggttttcattacccccgatgagccgtatgagcgctggcttcgggttccgaagtccaaacgcagcaagagtatctctggggttgaggatcaggttgggttggcggaagctaataaggcggattcgtcgacggtggagcagacggaggctaaacagattgatgagaacagtcgggatggaattgagattgagagtctcattatcccggagttggttaagctgcatactaaaatgatcgagaagaacaagcaacctgcgcagtgatatttcttggatgtacaattcaatgtgaataaataatgagtcttctcgggtcttttagttgaattaattaatactgacatgggttcgatgtagtactatgtatgtctatgactttatatatcattcttacagctagatcgttgcatgcactcatttttgagatattcaacccgctatcagtgttactcacacactatgaactattttcctttttgtgatgtcttctatactgcttttgaaggattgtatcaccatcattgaaagactgtatacgactaaatcgtgtacacttaggtactttctgtatatgtatatgtgactactctcaactcttgaatgcttcagattcgactactcaacacgtcatgatatctccgtgctgatcctggtggaccctgacatcgtgcgggaccccggagctcttcacccctgaagtgaagccttggaatatctctcatttatagcaagggatcaccatatctcaaacaacatatattggattcaaggggcagctatttaaaacctccaaattccatctgggctacgcgtcccgatgtgtcagcggcaaacttcggcggcgatcttccttagctccgacctttccccagtaatttgctcttttggttaacaggagaggggggaaaagatctattttcaagcactgttctggagaaaagatgatcaattgatctattctctgtttggtgtactcaattttctcaggatggtgtcccgccggttcagccgtcgcctgattgtagttgcaaccgtcgttgcgctcatcttcctctacaatatcggcttcctctccagtcacaatcgccaatggcgccctcacttcacacctacgccggaaatcaccccggccctcgatgagaatggtgaaccaaccacatactgcccacccctacccggcgtcgaagatgtgctcgtggtaatgaagaccggagtgaccgaatcgcgcgagaaagtccccatccacttccgaacaaccctacgatgcatcccccactttgtaatctactccgacttcgccgaagaaatcgagggcgtccagatccacgatgtcctcggcaacatggacagcgccgcaaagaaaaacccggactttgacttctaccaccgcatcgtgaaatacggccgcaagggtctggagcaacacgatttctccgacgaagccaactccgccatcggaaaacccaacaatccaggctggaagcttgacaaatggaaattcctcccgatggcccaggaagcgctccgctacaagccggacgcgaaatggttcatcttcgtcgaagcggacacgtacatctcatggccaacagtcctaacctggctggcccggttcgaccacaccaagccacactatctcggcacggagactcagatcgcggacgtcatcttcgcccacggtggctcgggcttcatgctctccaatcccgccctacagcgcgcctccgacgagtacaccgcccgcgaggtcgagctgaacgaatatacagaccagcactgggccggcgactgcgtgctgggtaaggtcctcagcgacgcaggcgtcaatctacactttacatggccgatccttcaaaactccaacctcggcgaactggacgagttcaccacggacttctaccgaagaccatggtgtttcatcgccgcaaccctgcaccacctctccccaaccgagatcgagagcctctggaaattcgaacaaaagcgctggcgtgatgtgagtgaacccaatccattctaccactccataacattgaaaaaaattcctaaccaataacccattatagaaaaataaacgcatcctcctgcacagcgacctcttccgcgaatacatagccccgcaaatagaagcacaacccgcacgtacgaactggaacaacatggcagacgaagaacagcccttcgcgcacacacccgacgactgtcgcttgatctgcgagacgcagaccacttgcgtgcaatttgccttccgcgaagataaatgcttcacgagtctcaacccgcgtctcggacatgccgttccgggcggtgttgcgacgtccggctggaatactagtcggatccgcgatatgacggcgaagaagggagtttgtcggaagcctgatttcggggattgaggtgtaccgtgctgagatatttttgggggtttttttggtttccgggggtgcgtgttattatatgttggttttttgccatgtacgtggttttcttatttgggtttatattgctttgcatcgagagcgagaaatgggcacgatttggcgattgcttgggcttggagcccggtctgatatttggcatacggggtgatttgggtcggttggaacctgcatttttttttctcctctgtgcatgtactaccatcttctgggacctgtggctgatgatgagcttgaatagacaagctgtgttagtggcgttggtgcttggttgaacccttcttatatacttgatcgctcaatacacatcttgatcaaattacacagaaacccatcttttcctgtggaatcacaactttgcttcgtcattgatctactgttcaacgaggtaactggaaaatagcaagaaacgaataagaatagcattgcttgggcgatgtcaaccaccaattaggagagagtacactaagaatatttacaggacaagtcctgctgtgcgtctgtacagatttcacggcgttatccatttacaacggtggagcggacgcatcctccatacactggtcgattcgcatgatgtggtatccggctcttttgacatgccgaatgaactccggtagatacccaatggtagtcggattcaggtagtgcatgacggcaagattcccgcccttgccaacactgcggacgaaggcttcaagctgcttctctggggtagttgtgtttgcccatagccagtcttcgacgtccacactccagttcacaatgtacgggtttggtatgtgtcgggctagctcctggcgcatccgggcagctactgtaccgaatggtgggcggaagtatgaagctacaaatattcactgtcagatgattctcggggatgcatcaggggcaaacatacacttgatgtccagccggtccctaaagatttgcatggactggatgatctcgtcatcaatctggctgagagttggcaatgcttccatccttgaatcaccatgtcagccctcttcacatgaaaccgaatatttggaatagacttactttgggtgggtgttcgaatggagcgccacttggtgacccttcctcaacatttccctataaaactccgtgaaattggtcgtccgatccctgagcccagcaccaacaacgaagaaagtgacccgcacatcttcgtcgtcaaggatacgcatgacctgctgagagtactgcggctgtccatcatcgataccaaatgcaaatgaattcggacgcgaacaacggagaaccaatcccccactaggcagcttcccaggcacccgataatgactattctcctgcgatggcgctggaacattaggcacgatctccacatgatgcagagtcagaggttccttagtatagaagccatggaacgaaatcgacaccacgcgattgaaatcgatattgaaatgagacagaggtatatagagctcacgacggcctgctggaatgtgggcattgccatgggggggcttgcgtcgaccgcccttgggttttctatgcttgtgcttgttcctcccagcatcggccttaacatcgtcatcgtcatccgagtcatcgtcaccatcttcgtcccaatcatcatccgagtcataggcttcagaggcagggtgaaccacataccgctctgcctggacggagtctgcaattccggggaagggactgcgttgagaactacattcgtcgttgtgttggttaaaagagaggctgtatttatccgtgccttcgaatatgacatgcaagtactcgttgtgccagggaaccaggctgtagcaggcgttggaatcgaactgggtatggaagttctcgtccgggtctgttgggaacagacgaatgaagcccggtccatattccacaggtaaattctcgccggaaccgtgccagaatcccagatcgttgcgagttgggtttttgaaagtgtcgatgacaaaaggggtgctcgacttctttatctgcgaggcattgaacgaatctctgtgggtgagccctcggagttcattccagtggccatggtcaacatttccgtgaaatacagctgaggttgggaaggatagcgaaagagcggcacaacctataaataaccaatgcatgataaaaaactgccttgaaaaaaagattgaatgtgctttgaagaggtcaaggtggaagttgtaaaatgcatcgtttatgtactcggcgcagtctgcctgggcaaaaagtcaagaacgattgactacaaatctaaaggcaggagctgtatgtcccaagtctgtacatctctacatgcctactctctacaatttaccagggaattgaaaaatgaaactagatagttgcataaaacccatgaaatccgtaaagcggcacatctgtctgaccttgccatccatatcactgcattggcactcacgctaaaaccgatcctgatccaagatcaaggaggaaaggtcttatgttccacagatccaggttgcatatcgtcaagagatcaagccctcaaaacttcttcggggtgtgagatctgatcctggtcatccagggtaaaatttcgaacttggtaaaaatcatcctctccaccttggacttctttcgtttccatttttttgttgaattttctgttttttccttgtcattgtcgtttgtgtttgttgagaaaggtcctctaggcccagaattcgtcatcttccttgggagcaggggccttgggggcccagtgagaaccggccagaccagccttgtccttgcgcttggctttctcatcctgcttcttgtgttcgcgaacgggaaggttcaaggcagaagcctcctcttcctcggacttaacagtgggcttggggacggtgtgcttggcagcagtgcctttggcaacagtgggcttggcaatagcgggttcggtaaaagcgggatcgtcgttgtaaacaaaatcgtcatcattgacaggctcgttattggcctcttcagcatcgcttgcagccccgttagcactctcctcaacctcgtcaggttcagcgaaagaagtttcttcctcagcttcagcatcagcgtcagcattggattcagcatcagcgttggattcagcgtcagtgttcgattcagcttcaccatcagcgtcagaaccagcgttagatccgtcttcaaagaattccttatcagagtcatcgtcaaactccagaacatcgtcctgagggcggtatgattcgaggaactccgggacgacttgattgcattcgaccaggatcttcacaagatcctcagcaatatcctcatcgcgttcattgtagaaagaggtggcgatgccttcgtttccaatgcgagcagtacgacctgtgggtggcaaagaaaagattagtggcaagttcatcaggagtatcggggaaaagcaatatctggagtaacacataccaatacggtgaatgtattcagtgatacctccgtgcgccgcgctggggagatcgtagttcacgacgtggagcacgttgatcacatcgagtccacgagcagagacgccagtagcgatcatgacgggacacttcgcagatcggaaggcacgcctaatttggtgggtcagcaaagcaaaataagagagggcagggaacaaatactcacatcgcatcctcacgctcacgctgagtccgtccaccatgaatcgaggtggtgggcattccagagttgtaaaggtaatcatcgacaaagtcaacctgatccttgctgttgacaaaaatcaaggtgcgaacaggaggcatgctgatcagaaggtcatagacggcgcgcatcttcttgtccttgtcaacccagacgatcttcaagtttcactaagcgttagctcgaattccacaaggtttctcccaatcttagtggttcacatacatcctgcacaacattgtggtgcgaactgccggctcggccaacgcgaaggcgcacatggtcctggctaaggtattgctttgcaagtttccggaagtccttgttgaaggtagcggagaacatcaagtagcggtgatcatcatcctcgttgatatcttcttcgagttagcaacactgaaacgcataaaggtggggtcgagagagcgccatagcaaacacttacctcctccagacatgatcttcttgaactcgtcctcccagtcggattcgagcatctcatccgcctcgtcaatgacggtgtatctgaaacctcattagtatccaatgactatggatgcatatcaagtgagttgcaatcatacctaacgcggcgcagagaaagaacatgagtctgtgccatgaaatcgagaagacggccgggagtggcaatcagaatgtcgcatcctttctgaagctcctcacgctggacacgagtaggggcaccgccataaacgacacacggacgcagcatggagcgatagcacaaacgacgcgcttcatcaaatatctgagttgccaactctcgagtggggcagacgatcagaaccagcggctctgctcgaacagcatcctcccggaggctaaagttcgccgtcgtgttaggacgaggagcagccagctttctcgccttgcccatcaacttggaaataatcggaatgaggaaggcccccgtctttccagagcctatgaaaattccgttaggaccaacttttgtcaaacatcagactgcgcaacacataccagtttgagcgactgcaataagatcaagattggctagaacagccgggattgcataagactgcactgcagtaggttggtcatagccgcagagacgaatgttgtcgagcatgaccggatgcaagccaaagtttgcccactatagatcgttagactggaacattgtcgctaactcatctcgcagactgacctcggtaactgccttgatctcgttaggactttcaatgttgaccttgtatctgttcaacctggagaagaagtcatgttagatatcaagttgatgtcccatcggatatgtcacttactcgtcgagcttggcgccagctcgagtaatcagctcgccatggaaaagctggtcctccaattcagggacggctgggccgacatcgccgtagtcatcctgccattcgtaacgggcagcaactccagcccagtcacgatgatccttgctgttagcaagctcggcatactcgaaaggaactggatcagtccagcccttgtcacgagcgaccttttgagcagcctcagggttgggaccgacaccagaaagaacgccggcaggcgcctcttcagcggcggaaccatgaacagaagcaacatcagcgtccaagacggagccagctgagccaatggctgagccagcaactgagccggcaaccgacacagcatcaggctcgtcgtaagatgaatccattgtacacgaaagtgtctcagatgattgggttcaagagaggcgatgaggtagagaacagggtggtggggagaagaggaaaggaaagggaaatgggcgaccgtggggttttatgtccgtacaagagcaaacgcagaaacgcgtgtagggcttaaacaagtgaatatggcgcgcaattgctttgtcggtcgccgactcagcgagtactcgattggtgactgcgatattgcgggaagtccgaagtatagggaagtgaaccggatgtacctttcccgactaggaaggagcgatccaggtatacttctatcctcatacaattcactactggtatggatgtacatggtctaacctttgctactactgtgctaaccattgagcttagcactttgatatgtgcagagtagtttgctttaacattcaatatcaagccgtctttcatctacctttgtctttctatacattcactcaagatatgcacctatacttatgctatatcggttttaagtacctcattctcaattctgatgcgacaaatgagaccttataaaagaaagcggactccttcttagcagcatatatatacttgctaatcattcagcgtagtactttgatgtaactatacagagtggtttgcctcaatcaatatcacgccgtctttcacctcctttgtctttcagctgcatattctactgatatatgcacctattactatgtccggtttaagtagtgattctcaattctgaatgtgaccttatgaaagaaagcagactccctcttagcatgtgtatacttccccaggctatccattagggcacgatcgacaaacctcgggacgttagctcctcggcttcccagggtgagaaagtggaccctcccgtagcccgtttcgggtagaaggagatatacgcagtaagcctgggaacgggtatcctcttcatctccagtgattccacctaggtaacccctgcacaacactcaccatggcctccgaacgaatggaggtcgataccaatgctcgccgcaagcgtccgaaccgcttggaagctgccatcaccaatcccggcgctgtcaaaatcaacgtcacgggcgcattcattgtcgacgacgaaccccgatccaagagtcccgtcgaagcagagggcgtacactatgagaacaaggacatccgacttccgcatcatacaggcgtcgtgagccatgtggctgtcgatgtgagttgcccggaatttattttctctcgtgccccgcactgcgaccggttcccccgcaatctagcggcctgcagataatttgttcacgatgctagaagaaggcatggctaatacagcattgggacctggtagattggcggaacacttgcgaagcttgtttatttcactcgagagctagagaccgcggataacggtggccgactcaatttcctcaacttcgaaacccaccggatcgatctgtgcatcaacttcattagacatcttaaggaggaacacgagaagcgcaatggctcaacacgggagggactatgtgtggtagctactgggggtggtgcatacaaatactacgatcggctgaaagaagaattaaacgttaatattctacgggaggaggagatggaatgtctgatcattggtaagtcgtggaacctgcacaagcatagagcatactatctaacatctccaaaaggactggactttttcattaccgaaattcccaacgaagtcttcacttacagcgacaccgatgctgagccactgcaatatgccgaagctcggcccgatgtctatccttacctcctcgtcaatataggatcaggtgtgtcgatgataaaagtctccggtccgaggcaattcgagcgtgtcggtggaacacatctcggtggtggaacgttctggggcattatgtcgttgttgaccggctcccggaccttcgacgacatgctagcaatggccgaccgcggagacaacagtgcagtggacatgcttgttggagatatctacggcatggactacaccaagattggtttgaagagcacagctattgccagtacttttgggaaggtgctgcggttgaaaaacgatgccgaacaagtggccgaggacggcgagggcttgattcgcgacgaccccagtgaagctagcgagtccaaccatggaatcaagcccaaaccggaagatatgagcaggagtctcctctatgccatcaggtatgtttcattatttccattcctatttccattctccgacggtctccgaactaacccggattagtaataatattggtcagatcgcatatctgcagtcagaaaaacactcagtcaaacatatttacttcggaggctcattcattcggggccaccggcaaacgatgaacaccctctcctacgccatccgcttctggtccaagggcgagaagcatgcgtatttcctgcgccacgagggctacctaggcgccgttggtgccttcatccaacgacagccgcaaaactggggccgcagaaacagtgttgacgacgttgtcgcaccgcaggcggtccggaacatcgttcaaaatagccatgtccttcagcaacatggcaggtcgtccagtgatctataaaatttgtgccagactaaaccattgtgaccctaccctctctttgctttgagtcctgataccccttgcaagcaatctttgaactaccaatattgtgccgagttcttttgtgcacccaaagtggctgctttaattggccacctgtgaaaaaccaacgtggcgattccgggcatttgtgcatgttgtacacttagatctatctgaagctttctagcttcctgtttgaatccaaacatgttcggttatcatgttagagaaataaatctaatatttcattccttttccgggcgtgtgccttgacatccgcctacgcgagattatccaattccgtgagaagatcgagttcgataaaaacggtggctttgttacgccaccgcttggagttgctctatcgaatgccctggttttcctggctatcgcctacatcgtgcccattcgccagcgcaaggcaaagtggccggctgacttcagtaccgacggggatctttacccggagaggtggccgaggggatgtatcattgtgctttgggcttttgggttgccgtttatccagagttactggaactcggaacagatatctcctatcagtccttcctggcgggggtagctctctcttcgaaagttgccacagtggtaccttatctcctggttgatccaagatttcacgcgaaaagtcggcttctgtcttcaggttcggggcgttcccttagatgacgaagaagcgaagctgtgccagccgaatatcgacgtcaagcgaggcttatctgcacttggtaggtgtgatcgatcccttctggcactcctggaacaaagattggcttgcgcggtagatcttgaggttttgctatcagatttgatttggtttcataggcttgatcatctccttatctagctataacgctgaaatgtaggaaaagatattaaacaaagacgtctcttataaaaagacattttgaaagacatttaacacgacatattgaataatcattcttggtctacaatgtaaaacatcacgttagagagacaatgatctcgccttagttctctcagtttgcatctgataatggattgcttgtgtttgcaatgcatgtgatgttgtcgaggggacgcccatttttactttcctggtattgtttgttcctgtctgctgtcacctaagtctcaccttcacattcatttgtgtgtctcacattcactcttattactgtggcttctcgtgtatttccccgcgcgtctttctaccttttacttgactattctatccttatctattctatccttattcttacaaatacggaggacttctctcaacttaaaagcctcatggcgcaatctccggctgctcaggatgcatctcgtctgtcgcctttccaggttgaggtgaccgagtatgcttgtccggactctgttctcgaagcaccggaagaaacccacgaacgactacgaacctcaacgccatcctatctcactgagatggacgagtcgatgctggaagatccgtcggatactgccacggtatcacagtcagtctcgaccgagagtcatttcatcagttctacagccccgcgtgtcagctatgaggtcaccgcgtctggcgaactcatgataacggaaggaatccaaacttccaacccaacgacgcctgcgcgtgggccccggcctggtcctccacctgcacttgtgtcctttgataggattgcccagggattaccgccaaagccggcatcttcatctaccacagcaacaactcaccctccatccctgtcagtggagcgcctcatcggcccaaagcagccgatccccgcgcgaatcctcgatcttctcgagcaatggcatgaggctgaacccaacaccgagcatcccgctgctctgactggccgtgctccatcaacatggaagaacttcagggctttcagtgatgatgccgacgagtgcgagctatcggtcttccagatattgctcaaatgtcaaaaccggcgcatcctctcgtatcgcattatgatacttcattcccagaatggaccagaggagctcgtcgtcttcggccaaccccggccgaagttcaagggaccctggaataagggtgtcaaggggctgtacctactggactggtcggaaatcgagaagaaaggagaggttcgggcgtgcggtatcaaactgtggagaaccgatgacaagaatattgcgttcagtgcctacatgtttgacgatggacgaaagtgcacccgcttcctcgatcacaatgctggaaataagcaagcctcatcttctactcccaagaaacagtctgacggaaatgagcatgttgaggacacccagtccatctcatccgagccaccgttttccccctcgagatctggacaccaaattcccagcagtctttccagagctgagaatgaaactgaagacagaaccccacgtgcctcacggtgggatcacccttcccccatgtgggctaagtccatctcacccgtccccactcccaataattacgatggattccgttctcttgcgagcccttggaagcctcaaaagaggcgccgtagctcatggagctccaatgaccaagactccgatcctattcgcttcaagttgatgtcggacgtgtctgatcaagtccgcgttttcaagacacttgacgcgaaggtgttgtttgaaaaggcctgggatttctacaagggcgtggataaccgcactggactgttgtgtaccattgctggtctcgacggagtccgatacgtgggagatgggtgtgtggatgaatttgatatccttcaggaggatattatgaagtcttcttgtggcgatgaagatcgcgtggttgaggtgaagcccgcaatgggcttctagatggccaaaatgggcttgtgggattgtgtgtggcggtaactttggccaatctctgcttctcgtctttcttgatgttgttggcctggtgtggtggttggcctagtggccattgtggtgatttcggccagtttattctgcaccggaaagcttcatccaaatcttttgtatctcgcctgcgcgtgtatgtatctgtacctaattcaaataaatgcaagaaaaaaaagaaatattacatttgtcagattatcccatgacccatgtaatcaactaacaacatccctctctaaattatgctgttattctttggcatagtccccattgatgtcaattatatatatttgaagtgaacaagttgtatataagctaggatgagctatgaatatttgacctcgctataccgggatacacaagctaaatacagtctacacctttaaaattgaaagcgtccgaggccttctatcccataagaaacgaatcccagcgactcatccaaccagaagaaagggctgacatggtcacgtgtagatatagctcactgctgaatcagcatctagatgcacgcgggttgcgccctcgttgacaacagccgtcacatctaccttacacatcgggcttaatttcttctcacaccatgccgcgacgctagttctacctttgcccgatgacgtctcctccttcgctagactccttcgctcccccgatccccgtcgaaacccattcaaaccgcaccccggagtctcctgagctcgaacggtccctgcccgaccccaatcgattagcgcccgaggatgcgtacttcgcaaacccactcttgcgcgcccgatcggcgcccagcaactaccaggaaaacttacgatcgttgaacggcgatagcagtgtgcatattgggtctgctgcggcgttgcgcaagaagttgggcggtgctggacggcgtcggaagcggaagggtgcttggaagaagttgttatgggttaagcaatcatgtatgtatgcgtgtgggtcgagaccttgtacagggcttgagcttggtgttgcgctgttgctgacggccgattcatagatcccgataactataccgacacggaaacgtttctagatcaccttcagcgcaatcctcgagtgcggccgtatgacttctggcctctggtggctgattcgactgtgattgtgcagcatgtgtgctcggtggttatcttcgtttgctgcttcgttggcattgtccaagatcgagtgagccctgtctcgattgtctgctggggtagtgttggtacggctatgggctggattctgtgggataattggatctggaacgagcatcaggaatccgtgcaaagtgcagatggaattactggaggtgatgatggatccagttcgacttcatttgctagccccatcgatacaccctccaatgacacacaatccgatgatccgaagacgaatgccattcatggcctggggctgtctatttccgggaatgaatcgaaagagcaactagcccgtcgcagtgcggatttcagcgaaagcatcgacgctgtggctcatttgacagcgcaaagtgctgtgccgcctggcccgggcagctccatcattggcactacggacccgtcgatatcgcaatatacccaccgcgtttcgatgctatcaccgcgcaaccgccagcgcttgactacagtcaagtcggccttccttatttacttcgccctcttgggcctcagtcccatcttgaaatctcttaccaagtccaccgccagcgactctatctgggcgatgagctgctggcttttaattatgaatatattctctttcgactacgggagcggggaaggcgctggcgccaccacgaaattccctgcttctttgtccacgaacgcagccgtgatggcatcgactgtgctcgcgtcccggctgccgtctacgacacacgtgttcagtctcatgctgttctcgatggaagtattcgggctattccccatcttccggcgccaactgcgacagaaatcctggactggccatgtgctcctgacactgacccttgtgatcgttgccggtggtgctgttggtgtcacgctgagtggcggatgggcagcagccataattggatcagtcctgggaagcatcttgactgcatttgtcatgggcgggtgcagttggtggcttatcagcttgcaaaagtacaagaacgtcgtgatcggtccctgggaccctgctcggccgatcattcggcgtcactggaactaagcccatatgtgatgtcttttagcgccattgtaatatagtttgtcggcgtttggttcgatcttcttgttgcttataccccttgatcagtctatccatttgaaacatcgtggaggtttcaactgccttctttccgtgtatcagttttgccacggctcaagccggtgctcgtagagtcaggtcctgacgtgattcatattcttcaaggaatacttccagaaatcctgggcatcaaatccggttttcatttcaatgatcattaggttcaaataaggggggaatgcgggttcaagaggaatgcaagacacatctggcatactaaccttgtacattgtccaccgttgaacttgccgccatatacctgcgaaggaaaagcgtttgatatttgaaacgtttcaatcagggtcatggacccttagtctatttttgtctattctcattgggggcagtatctcgttcgaacagcctcaagggacttggcattccgcagccactcatttagcgcctagaacccttttttcccccagggggctttctgactccattgattgaccagacagctggccactgatacgacattcccaaacggaatggtccacatgccccgcatgcacagagacacatgttcgacggcctgagacgattatcctggcatgtctttgtgcagaacaggaatataaacctgaccttcttctgttcctgatgtctgtctctattcttccttctgcttactttgttcgcggcttgaagctgcttctcgactctcaacgacaggctggatatctgtttatacattctttcctgatccctggatctaccttacgacctgataaacatatcgtaacgaccgtcatctaattgattccatcatgttaaaacgactcgcacttggcctgctggccgctcagtccgtggctgccacgcgctttgccatgtacatcgacgagttagtacaaacttgcggaattgatctacataccctgaacccacagctaatacttgcccaagataccatgtaaccgctctgccgggccagaaccagaccgagggtatcgactatgcaattatgagcttcgctgcctcgaagctattcaactcagactcgcccgcagcatacaagccatttgagtcgcccgagaccatgcgcaagcgcttcagctccggtaccaagctaatggtcgctattggcggctggggcgacaccgctggcttctctgagggagcaaaggatgcggcttcgcgcacgcgatatgccaagaatgtcgcttccatgctcgacgcaaatggattcgacggtgtcggtaagatatcccaacaatgcgttctggatataaaagaagaagcaaggtactaacctatatgaacagacattgactgggaataccctggcggtaacggccaagactacaaagacgtgcccaactcgaagaaagtggacgaaatcgaaacctaccctcttttcctcgaagctgtccgcaaagcaatcggcaacaagaccctctctattgcagtgcccggccgtaagcaggacttcattgccttcactaaggagcagggtcctaagatcttcaagtctgtcgatatggtcaatgtcatgtcctatgatctgattaaccgccgtgataacgttaccggccacgctagcggtgtccagggatccttggataccattaacgagtatatcgccatcggggctgatcctgcaaagctcaaccttggcttcgcgtactacgcgaagtggtttaccaccgaccccaattccgattgtgatgagaaccctctcggctgccatcttgccaagctcgaaaacgacgatggaacagacaatggcaagtctggtgctatgactttcgaagctagtactgctgccgctgcgcctaaggatctgaagcaaagcaccgatggattgtgcggatttggagcgaaggccaagtgcccatcgggacagtgctgcagttcttccggctactggtatgcataacatcatttaattctgatcagtatctagactaaccccttacagcggtactggcgatgatttctgtcaggctgggtgtctctcagactacggtacctgcaagggcatctccatcaccgactcatggcgcaaagcccagaaggacggcaagaccgacgagaagggtggtggtcagtactactttgacagcgataataatctcttctggacctgggatacacccgagttgattgcccgcaagttcaaggaaattgtcgcggagaagaagcttggtggtgtcatggcttggagcttgggcgaggatacctacaagttcgagcacttggaggctatgcagaagggtctcaagtctcactctcccaaagtcgcggagcccccccaatgaccgacagagactgtgcctagtagctagatgcagttatcattgatggtgagtcggagttggagctcagcttgtgaaatataccaaactgcttttactgtctattcgattcccctttttgcttcatttcatctctacatctcttctattgcccatgtctacactatcaatgtcctcatagtcatcttaatatctttcttcggttgaatgccggggtaaaattcaaatcaccatcatattccctattcgctattcattcggtagtccaccgacccatccatgactcaatgtacctctgcaccaagccaccagcaacgggatcctcaacacaagcaagatatgggcagtcctgaaccgtccgctcggtttcgaaagtaagaccagcgtcttcaataccgcttggtcctgtctctgacaggccatgacttgcatacttagccgtccagaaatcgatgagcttcatactcggatttttctccgggtcctggtcactactcgccaatctcctcagccactcctgcggagatacaacctcaaactccggcaagatagatccatccctcagagcaggaagcaaatcctccttccagctaaatgtccgcggattaaccaaatggtacaccatattggcttcggaagattcagcgacattcatggcgatatccgaaatagcccgagcacactgatcaacaggcagccagctcagccgctcattcagctctggcaatgcaccagtcgtcaatgcacttcggaacataagcgaaacagcttccgtttcattccattgcgcgctaaacgtatcgccaccaagctgaccgattctcagaacgcgagcttgcatgcccgtctgccgcatagcgttacgggtgatgtgttctgtaaccagctttgacctgccatatcccattttctgtgcgtgctccaagttctccagtatcgtctccggaatcgatgccggtttgggtgtgttgcttgcagcgcttacactggagcagaagaagaagcgcgcaggggacggtaggagggagcgtaggcagagattgatgaggttgtgtgttccgcgtatatgctgttgctcgaaggaccgtacgcctaggttgaagttcaccgcccaggcactgtggatgacgcatgtcaaggatgacagtaagtgttgcaaatcgtggtctttcagaccgaggttcgactgtgacaagtcaccggggatggcgtgaagctttgcggcttcggcatcagtgagagtgatgttgcggtcagctagtgatttgtagagacgagctcctgccgctgcttgtcctggtgcgcgcacgattgcccagacttcggagactgttggtcgccttagtaattccgagacgatgaaggctcccaggttgccggttgcgccggtgaccaccacaacctctgtttctgggctttgggtgatggttgggaagtgttgagtgaagtgggagtacttttcgatcatttcgcgcatggaatcaagctcatcttccttctcggattcttcaccagttcgcagctgatagaggtgctttgcaagcgccttgacagtgcctttttcgaacacaatgttctgggaaagctgatctcctcgctcggcgatatcaatatcgcgcatgatgaacctccagatttgtgtggtctgcaagctgtccactcctgccgagaagatgtcggcttcggcatcgggtattggtacgcccaagtcttccctgaatcttgaaagcagccaatcctccagttctgagacattgagagagagggaacctcctttctggccactcccctcgaacttggcatatacctgcttgatatcctcctcaaattgctgataaacctgacctcgtatacaggttcctttatcagttctggggtatacaacatcagcacccttaattatgaccaactcctttgggatacgggagaatgtctcggcgcgagaatttgctacttcaaccgctggccagatagcttccaaaaattcctcgtcgctcaagtgaggcaccttgccaggagcacggaaaattaatgcaccaggcaccgtccgctggaagccgaacacaacgcaatcactcacgataggctcttctctaacgcgaccctcgataggaataggaagcaccttttcaccgttgaccagcgtgattcgatcatccagccgactcaaatacttgtaataattgctcttcgctggatccgggtgtctggtgaacaaatcggctgttctgaaagagttttctgggttcttcgcgctatacggtggctttgaatttgacgggcccttgctcggcaggccgtccaatgcgacacattcaaaaaccccaggcgagatctcatccattagagtgaggtcggcaatgggacgatgcagtcgtgtatactgccactctttatcttccggagctcggaaagaagtcatgatttgtcctgtctccgttgctccatagttggcaactagattcacgccctgtgccacaagacggtcaccaaggtcgtctgggcagctggagccaccatatagcacaagctgcggtctggctagtgcttggataccttcttgcttctctgccagtagtttgatgacatatggcacggcactgatttgctgtggatgggccatctggagcgcatcgaaaagattttggtatgtgactggaagagaatggtttcccaggtacgctgtcgctcttgtaaagaatgcccgtccaaactccatcagagcatgggagtggaagagtgggctgatagtgaagaggcgtaggccgaagctcttgcggaaattggctagagtttgaaggttggtaaggaaaatcggcttcgggaaaccggtactcccagaggaatgtaggatccaagcgatcttcttgccttctcgtgatggatccgcaccctggcgttcaaatagaggcgtgctaacaggtcgattgaaccagtcctctctttgtagtagagagaagctaccgcaaccaggacgctcggtacaaatttcagttacaacttgctgaaattgcctcgtgttgataatctggttgcaatttgccatctccattagccgggcataagccggggctgtaagacgtgtagacaagaaaagcacagcatagccaagacgattcagcgcgaagaaagtcaccacgacctcgaagctagatccagctagcatagcaataacaggcgcctgctcgagcctcgggtcctaggggataattagtctagtttgacacaagaaactggctttcttcttaccgcgggtaggagaccttgcttcatgtaaaagcgaacagcgatatcagtataccgattgatgtcaccggctgtatgttcttcgaaatcagccgcttcacgaaccggatagcatatcaaaggcctttgtgcttcatcttgctgagcggcatgggattttaatagaccatcgatggtggcgaactgttcaaacgccggccactgggaatgaagcgtcccgtttaacaggcgagtcgcgatatcttttgtctggagtggctccacgcccccttgggtagtcgtgatggttactgtagtcatgattgttgtgtaaaataccattaacagtccattgactcgagatcgctttatacctggcggaaaagcctcacgttggggtaatcccacgcatcgcgggtgcttttccgggtttccgcgtggatgccccggaaaacacttaaccccagatttggatccccgcactatttccaggtttcaatcgaggattctcatgtaaatgttggtgaaattggccatattgtaatgataggtgcagataacttcgccgtatgagatgagacgaggtgttgattacgttgatggctcggatatccgagatggcaatgcatatcaggccaaaataagacatcaaattcaggcatcgaattcaggcatgaatattgtgatgacataatcacaggctactaactagcctgaggccacacgccaagagttcacatattacctccctacaacttgcaagcgagaagattcacagatatattaaacaaggaaaccaaaaaaacgaacgcataagagataaaaagtagtcaacatgttgtaaggatctttttttggctggcgcaaacaggatagttcttccaaagctgcctgaagccctatattgactactcaaggctaggaaaagacagagacatcacatttgccatcactccacttcacagcctgttccttggtaggatacacatggacaaatgccaagtacggtgatttatccgagcctttctgatcactgcacgcctgctggaagcgggcggtcaaatcctcctcctttgatgctggagttgtcaaaaagcaagcgcgttcgcaaagttttcctttcatcttgtcgcaaacagcctttcgcttttcggcgaccgtgtctggtaagtcaacaccagtacaacgggcttcaacataacgagtcgaatcaagagtgctaggatcgcaaaccatccgcacaccacctgcctccatcacgacgctccatttgcctcccagacaattatcatcgcaacctttgttggtgcggcagtcttgaccaggggtgtattttgcagtagctgacgcagcaaagagcgtggtgatggcgagaaacagcttcatgatgccttttggttgcacgaaggtagggcctgtaatttagttagtgaaatgcatggacgcagtcaacgaggcttcagaagcttactatggggcggaggatggataaattatgatgcaagtcaggaaatggggtagaggattcgttgtatgggggaaaaagaagctatgagaggagggagcgagacctccttatttatgataagaaagagcgttccatgttgaagaaagcgagtgagttgctttttcctatacctagtttgttcaatgcctcgcatttctcatccagctgaaatgtgggactaatcctagttaggtacctgaataatgcagggcaaaagcttgagtatcatgccggtaactgtaagggagaggtccggccaaatcgtgaatactctacaataggaagacaggtcccacgacgtcggctacctgcctcctatgtattgtcgatcattgtcgatcgtatatctcaatctacagaacatggaattctggcaggaatacttgcagatcattcaaccttgcatgatcagcgggaaactactcaaaaaccatcaatagtcgaaccttaagagcataattggaaagctaatatgtataggctacaggagattcgagtgaattagtccggcgacaaccatctggtctctctccttgaagacaagctccagtcttctgttacaaaacatctacctcttcaagtcaatcaacatgaaatccacttttcttgtttctcttatacctttcatacagggtgttctgggctctgtagaagtcctaggtggctcacctgttacgattgatgaccttccctacctggccagcatttcgaaatcaggcgtctatacctgtgctagtgttattatcagcaacgaccgtgtcgttacttccgtgcagtgcgtttatggcctagagtcacaacccacgagcctttccgtgagaacaggctcaagcaaaacgtcttctgggggatctgcatggacagtatcaaagatgatcggaatgctcggtttaacactgacaccaatgattttgactttgccgtgctcgaactattttctcctctcgtacccggcccgactgtcaagccgattgaatttattcagtctggtcaggagccagaggatgggactgaatgcgtagcttccggctggggtgactcgggagaacaattacaatcggttacactccctatcgtgaaccgagaagaatgtaatcagacttatgccggccaaatcaccgaccttatgatctgtgctggctcagaagctgggaaaggtacctgtccaggggaccgtggtggcccggttacttaggtggtaaatttgctggaatcatctctcaaactaatagatgccaactacttggtcgtctagacgttttcaccgatgttgccaactcttctattcaatcttggatacaggatcagtaatgacaactcgcagcaggtatttgcccactgaggttctgcgccaaaagacagaacatggtagatgaatactgtagagtttcaaggaccgtcacaatttcaatgttgaatttagcgaacagcgtttataaaagcccaaactaggagcaccaaagtgagcattgacttgattgagcatctatttattgaagtcagggaatgtaactcccgcaagttctcaatataattgcttcgcttcgctccgcaataataaatattgtacgaaaagtatcaatgtataaaaaatgtggcaaaacagaacacttgcttaccaatcgagctcctttgttatgtagttacatggttcaagtctattagtaaaagattcactgtacacatctaaattctaatatacatcttgtcactttaaacacggcacaagcgaccattctgatcgggaaggccatcaaggctcttgacaacccaatcctcactgccaacagcagtaggcgcatagaacaagccagtcgggtcataccgctgcttaatcttatacaagcggccgtagttggtaccatagaaagcctgctcgaacttcggttcgttgatatccgactcggacatgtatgcgccagagtcagggcaaacagcgcgccacttgccaacggcatcggtgaggccctccatcttgactttgatatcggcatcggaggcggtatctgtccaggacgtcgacgtgatggcgtgcatcaccgcctggcggaaggctgggtttgcagaattgggggtgaagccctcttgcagctcggctttcaggttgaatgcgagcaatgcgaagccgtcagtaagagtggagcgcagggcagcgaaggtagcgttgaatgaggtgggggtggcccaattggcccgtgggaagaggcgagagccggtcatcatagttggtgaggcgactgattcgagagggaatccggccatccaggcgtcgtagtagttgtcgtagtaggtcgtgtttggctggattgcgatgcctagctcttggaggtcatcgtaccatggcttgactagggtgttgaactggtccacggtgtggttgacggcgaagaaggggttcattatgaaggtgaaggcgtcagtgcctgtgggcagcacccaaaagtaggcgtaggtgccggcgtcggcgtgggtggggaagcgctccaagtatgatcggacgccagcaaagaaggtgtccacagagatattctcgccagttgagaagctaaatgtcgaaagagtcacaccgaccttaggatagacacgagagataatagaagtgacgactccataggttcctgatgggaatatgttagatgaaattcgagaagagaaagcgagagaaagtacacataccgccgccaccgccacgcagagcccagaatagatcgggattactttctttggtcactgtgacgaagcgtccgttggccagcacgacctcaagggccaagacttgatcagcagccaggccgtacacgctagacatgggcgaatgaccgccgccgagaacgtagccaccggcaacaccgacagtctaataaagtcagttatctcaccaaacgatgatcctttcggactgaccaactcaccttgccttcgccaccaacagcggtgaatccgagttccttactcttctcatagacttcaaatgcctgcacacctgaccccagcttgacaacgggaccctggtagccggagccgctatagttttcaatgtagtcaatgtccttaaggtggtgagtccagatacccaaagcaccagcaccggttgattttccattgaagtcatgcccggtgttcttaaccactagacggatgtccgcgttgcgtgcaaagttgacagcaagctggatttgagctacagtgctcacattcacagcatagctgctgtagccaccgacagtgcaagatgcagaggcattggtagtgggaaggcaggttcttccctcaaacagaggccacattgccgaggctgggtcagcagcactaatcgtagaatcagtataggtccatgtttgatagttacaggagtagggtgtgactaactgaagattagagtcgttccaatccgaggtaactctctcgcattcggcgctgtcatattcgggccatgaagaatagcaagacgccgctagggggaccgtcttgatcagcgcgccaccgaggaggttgtccaaggtcgaccatgcagactgcgacggccaatagcggtcaccggggaaaaccttgcattgccctgaagacagcgtggtcttatcagtgccattgctatcgccaaatttaaccagggctgactgctgtcggttgagcttcgcaatttcgcgatctgtcaattgaaccttctcactgtcaaacagcggtgcaccagccgaagcctgaccagcgcgggcatgtccgggggtgactagtaggagagcaccgagcaaaacgctcgttatagtcgaacaaggagacatggtgagcgtgtgaatgggaagaagctacaccggggatcggcatgattgggaaaaagtggccaatggagaccttttaaatcaattctccggcgctcgccagcataaaatgtgcatggtacgatatactagttagcgcaacgtggatagtactttcgtcgctatgaggttggcatccaagaggaaaaggcgcttgtttacttcgcccccacagcaatttagaatgtctcgctcaagccctctcccactccacctctcgtgtatctcttccaacgagaatcgaaatttgcatgaagctagagctagagatggtcttttctccgggcctccccgttcggcaaaataaataaagccacactctacctgtgacgcgcggaacgagtccttgccgtgttgttgagaatacaagtccaaccgagactgtcgccattagcttatttccattcagtgcggagtactccggatagcgtaagcaaccgtgcctattcccactctactccgtaccggtcgggatgatcagggtttcgatcttgtctggttctcttgttctctcgttctctccacggccgagagagtgttgcaaggaacaacgcaagccaagaactactccgtacaagatacgtgaacaaccgctactccgtgtacgaacggagtttttcttttcggcttgaccctacggagtaaacatggtctggccgggctccattctccatcccccgtccgcgatggtccactatgctccacctaagtacggagtactagatccgatctgctttctgggcaatgagaaccttgagtgcaagggactagtaggatgttgcatttcatctaattttgccaagggtcagaactaaaaaaactaatgaaaacttgttaaatgacgcagaaccgggaatttcgtcgtgggggccaaatatatacggagtgttgtgtccgagatatcgagctagaccgatgcactcatacacactatcgctgacgtttgatccttgatgatccaccattgagcacattcctgtactcactgaaataggcacttgtccaaattcaataacaccggcataagtgtataattgggggagttctcactcccgcccttttcgtcctccttatacaacataaggatgagctgcggatgtaacgctgcaagaaacgattaagctttgactagttagcttgcgagaggtgactgctctcggtatgcaagtagtatcctgtacctgcactagatgaggaatcgcatattacttcctgttacggacaattcttcagagcctagggtttcaatcccacttgaacacaatgaaacaatgcactactcaagcagcgaggacctgctcttctggtttctgtctaggagtcaaactaagaaggactcctccaatctaaaggacgcgtgcatccctgcacgccatgcattattggctctccccttgattaccggcatcataggtcaacggaaatagagccaattgggacacgaaggccgcgacttaaattagatcaatcaataaagtgtttatctaggtagaaacccttggaatggcccccgaacttcaaaagctaaagccaaataagtggatcatcgttgccgatcctaagtcgctgtgttggccgcagtaccagccttgcatcttaagatcgaaggtgcaggctgttcgagaactattacgttcttccgggtgtttatacaatggttgacgaccatcaacataaaacagccctagggattgtcgtcgcattcacggccctcggtggcattgctgttctacttcggctctggagccgatggctatcacgatcggcactcaccagtggtatggaacgaacgctcagatcggcactggaattgaaccattagaagtggttgctaacgagactcccgacagatgactgcttcattgttgtgggatatgtaagatcgtcaaattccagatccttgaagagtgtatgctaaatgggtattctctagatcatctccatctgccagtctattacctcgtggtactgtaagtgatgtgattcatctaagaaacagaagtgagcaactgctaattaaatcagacatcaaaaccaattatgtcggctttcatatttgggatatccccaaagacttcaatcccagacctgggatgaatgtaagtctactacccagcgcccgtaatagccagaggctcacggacaaaacagtggaacttcgcaaatcagattctctacaatccagccttgaccgtggtaaagctgtcaatattgttgttcctgcgccgactcgattcgcgctcacgggtggtcaaatacctcacctggagctcgttcgccgtggtaatcactctttttatgaccgttctcctcgtcgacatttttcaatgcaatccagtagcatacgtctacgacacgacgatcccgggcggaaaatgcatcaaccaaggcgcattctacgtctcaaccgcagcgctaaacctcttcaccgatataatggtcctctcaatcccggtcataatcactgcgcgccttcaaatgcccctccgacgcaagattgccgtgtgtatcatcctatgcctaggcggagtgtaagtaaacccccgaaatccaaccccaaccacccatcatacaccgcacacagcaatctgacacatccaaccaacagagcaaccgccgtcggagtctggcgaatcgtaatgctcgcccaagcatttctctccaacaccccaaacccagacccaacttacgcaatcggcttctgcagctccgcagtcgaaataaacgtcgcagtggtatcagcctgcggtccgtccctgaaagccatcagcagcaggatattccccaaactgctcggcagctcgcgagggaaatccacctactacggcgccggcaccggctccggcaccggcgtgggctcacgcagactccgctcgaatgcgttcaagtctacctcacacgcccagcaatcagtgtactccacccgcggcgcagattacgagatggccgatccgctgggcgggccgcgtgttgatgttgttggggattttgaaatgcgcaagtataagcgtgggggtagtgatagtggtctgagtagtgaggatggtaagggcattatgaagacgactgatatctcggtcggatatagtatggagccccgggtggaggatggtcggtcgcacgatggtaggccggccagtgtagatagtatagtttaatcaccttatatacaacatagatacgatttacgaattcaaatggccaatagcctacttgaagaagaaggatatcaaaatggaccgaggatctactccaatttcggatatgaggggttactctgcgtacataaggtatggggtttcccctcttataacatcacttacctggtcaattcagtaaatttgacttgttttcatattcaactcattcttgattcatcgatatggcgactcagtaccagctaccattcaaggtatggcttttatccctccgcggggttcggcgagatgtccgaagtgttgagctaacacgactttttccagctcgcggatcctagtctgctgaaattcgactccattgtcggcgacaaatgggtcggtgcaaagagcggaaagcggtttgaagtactcggtaggtgaaagtgcattatcctccaagagctcacaactaacatctcccacgcagaccccggcaccgacaaagcgtgggccagctgccccgccaacgcagcagaagatgtatccgccgccgtggaaaattcccacgcagccttcgagcaattccgcaaagtcaacccacgccaacgcgccaagtggctcctaggatggtacaacctaactgtcgcggcccgcgacgacctcgcccagatcgtaacctacgaaaccggaaagccgctggcagaagcatacggcgagattgactactccctgggcttcctatggtggttcgccggagaagcagagcgcatccagggcagcgtatcaacagccgccgcaccaaaccgtcgtctgttcaccatcaagcagccgattggcgtagcagccgctctcgtcccgtggaacttccccgttgccatggttctacggaaagtcggtgccgcactagcggctggctgcacgatggtcgtcaaacccagtcccgagacgccgatttcggcgctcgtgctggcagagctggcgcatcgcgctggaatccctgctggtgtgctgaatgtgctcactacggacttggagaataccccggctctgagtgaggcgttatgtaaacacccgcttgtcaagaaggtgacgttcacaggctcgacacggataggtaagttggtggctgcgcactgtgcgcatggtcttaagaaagtgactctcgagctcggcgggaattgtccattccttgttttcgacgatgcgaatctcgatcaggccgttgagcagctgatgtcgctgaaatggcgccatgccggccaggcttgtatcactgccaatcgaatctatgtgcaggctggggtttatgatcgcttcgccgctcttctgaaggagcgcactgctgcgatagttgttggtcatggtgccgcggctaacaccacgatgggaccgttgacgacacctcgcagtcttgataaggcctctgcgcaagttgaagatgctcgtcgcctcggtgctgatgttattttgggtggtaattctctgacctcgaagccgggttatttcttcgagcctacaatcttgtcaggaatgaccgcggacatggccatctcgcatgaggaatcgtttgcgccgattgctgcgctgtatcgattcgatactgaggatcaggctgtcaagctggctaatgataccagtatgggtctggccagttatgctttcaccaagaatatcgatcgcatgtggcgactcttggaaaacttggaggcgggaatgatcggaatgaatacaggtgggcttcctatgatcaagtccaataattctaatcaatctaacgaattcgcacaggcaactcatcggctgccgagtcgcctttcggtggtcttaaggagtctggttatggcaaagagagtggaaaagacgtggctgtcaatgagtacttggtcaccaagacaggtaccttgacaattgagggacaatattgagtacacaacatagtacatatgcattctttatagatcatctcgatcatcttgaactgaaatgaaattcatgtattttcttggttgtgattggtcagctgaatccacttcaagcactgattggctacaatccggggagatcttttcaatatcagattttcttcactacaccaactattcttctcatcatggaccaccttagtccgctacgacgcctgattcagtctcacccgcttattgacagtcattcccacaacctactgaaccgcgaatcagccgccgactatgaaaattacccgttggaagccatcgcctcctcagcagacggtcgggccttagaaaatgcacgcaccgccctcccctcgctgagggccataacccagctctccgagctgtacgacctcccatgcacaaactggaaagacatacaagctgcccatgatctctacgtcagcgaagactacgaaaacttaatccggaaatctctatcaggcacacacgcactgctactcgatgatgttctcagctacgacgaagacatcgcatcatctagctggcacgataaattcaccatctccgggacaaaacggatcgtacatatcgaagccatggctgaggccacaatcctgcaggtatcgaactcgcgcaagaacggcgaatcagtttggaacagtttccgacagcgattccaggacgctctcggcgaggccctggacgatgccaacatcgttgggtttaaatcggaaatctgctgtcggaccggattggacgtggatgcgtattcctctgatgataccactctgggcgggtcattgattcgcatcctcgattccggcacaacaaggtctggcttcgcagtcgatgataaacatatatgtgactggatagtccagcagacgctaaaagcgatctgctttaaaaagagagccggtgttgtgaaacccttgctgttccataccggcttgggagataatcggattaatcttttgcgagctaaccctgcatgtctgcagcctttgatcgcgcagtacgctgacgcggacatcgtgttgttacatgctggatatccttacacacgcgaggcgggttatctggcatcagcttatcccaatgtctatcttgaccttgggaaggtctttcccttggttagccgagaggcgcaggtgaaagtcctgagagagagtctggaacttgcgcccaccaaccgtctgctctggggtaccagtggccggtttcacccggagacgttctggttggctaatcgacagttccgccaggctcttgagacggttagttcctggactgcctcctattaattacctttccctatgctaattttcttctgttttgcaggttctcgtggagtatgttgaatctggcgacttcactgcgtcccatgccatgaagatagcagcagatgttctgttctataactccaatcggctttacggcctcgacttgactccatcatacacacctggagagtaaactgctgactatgcgaggatgtagagcccgaaggtatgtccatgtctttcatttctattccccagatgcatcctgacaattatctcgtcagttgatgcttctactctcacgctctcctaatgtacttgatattgcaaccccgctgtcaaaattgattatcaatctttgagattctcagaatctctcgaaggcgatacggacctggaagcactgctagcgtcggagcataggaataactacgtttcgtgaggtaactgaacctcgcatccaccccgaataaggctatactgctccgtattaagacgaaattttgaaccagttcatacgatgacgtcattgtagttgtaatgtttaccttagcaatttgcaacacacccaacgtcaaagtgtgtaaagataaccgtctcgtcaacaacccaagagatagcggcggctgccgctttcggccgttgagatttatattacgcgaagacattaccgtgatgctggtgatcgtgctgaagagttgttagccatttaaaaaagcctgaaccagatcgacatagtggatcatttaggacacgcccgagctcacattgcctttgtacgtttgtcccaattacacatgataagttgcgaagatggtcaaatttccttgcatggaaaaaattctacaatctaccagaagggggcgttttcacgtgttgcatcccatcccatattacgcggtttctatacattagacgttctcggaaacgcaaatggaagcttgggaagttataggaatcgtttcatctgacattaaaatccgaagctatgcgttatgaggcacttgctggcagtatgagaagatattcataaccctctgggagcttgcccaatggccaatcccacttcttctcgaccaccgccagcgccttcaatggctcttcgtggtccacgaagaacttggtattcacgcccgaaacaatcccagtcgtatccttgccgtcgaatatgattccacaccgctcagcatctcgaatgtaaggcaccggggaggtcgacatggtttcattggcgttcttagcaatgaaatcaaggtctaccttttcgatagttcctactcaggataagtatcacgcctccagagctttttgtgtgggacttactatcaaaagctttgacggcagctagacaggcagctggatgtgagctcatcacgccgtatatagtatcatggtctgtcctgagtattcgcaaaagactagtcgcaaatcctttgccacggtggtgccgatcgaccactaattgagtgatccagcaaacagtcccacccttgcaagtccagcggcagccgaatgcatgtccgacaagttttccttcgataatcaccctgctgtatgtagaaactcccaccactttcgtcggagcttgtgggtaggtattgttcgcgtagtcttcgcacatttaacttaaccggctttcctactaaaagttagatgttttggaaagaaagcttttgacttactcaccgggattacttgaaaactcgccccaatgtgccatagttttccttgaagagctgagtggccttgatcagtatgtcgtccgtaacgttctccgcagggatcgtctcgtagatttgtgacgccatgctgaagtgtctttgaacattagtactttcaatgagttcaaagtgagttgactccgcgggaataggatgagttatgacgatggtttatgcaagtccccgttggcgtacatgtgagggggagggctcgtttatgtaccacaaaaatatgaatctttccatgcaaaagttaccagtatgtatattgaattctcgtttctcatattagaacggaatgtgatcgtgatttttttttccatgccgtccttccctcgtcccaaatcgtatacatatcgcaaggtcagcagaacaatccagcgccacctgaagtaacagacatctatgtgcgaataaatttcaatcatcggatcaaatccaaatataagacacgcgtataccatcgcgagggtatatcgttgcacgtcgtccgattttgagcgtcgtggaagaagcgaaagcaaaaataaaaggtataccaaccccagccgtcgcttcccgtgtatccagcgttggtctggtacaatgcagtgttaatcaataaatagctcaaacaatagcagttgttggaatgtgtgtgtgtgtgggatatggtggggggagagagagagacagaggaggagaaatcaaaatgtccattgtctgatatgatagtattgataatgttataacaacacaatcaacaccgatcacttcttcaggtcaacgacagattgatatcatagggctatgatgagtacaaaaaagaaagaaaagaaaaaaaagccaaaaacagtggtacatttcgtgtgcggtttggtagggtgtgagagtgagagaatgtgagagtgagaggatgagaggaagaagaaagaagtagggaggtagatgtatgctcgagacaagagatcctaagagccaaggccatcggacacatcatcgcaagcaaaaacaaaggggtaaaggatggaaaccagcaaacaaaacgaggatttcaaaaaaaaagctcgcacgccgaaccaaaatggacaaaacaatgctagttcaacatgccatcttccgttctgttaccatttcatccctttcccactcatctagtagtcgtgctacttctctgaaagataccggttttgtaaggaatagatccacaccagaagccatagcatccgactcatcgcgagagctgctgagtccggtcaaggcaatgatgatagccggcttgcggccatctatatccctctcgagagagcgaatagcacgagtagcctcgaacccattcatgacaggcatcgacatgtccatgaagatgatatcataaccactctgcatgcgctccactgcctcaacggccaccttgccattatcggctgggtccagctcggtcagctggcgctttttgaggaacgtcatcatcaggttgaggtttatgcgattatcgtcaaccacaagcacccgggctagtcgtcgagggcggatttcaccctctatcagtggtgctggtagaggggattctccaatctcctcgggcaatgtgctgattcttgagggatgttgcagtggtgatatcgtcatggggcggactccgggacagtctgccagttcgggggcgctatgggcatcggcaggggatatgagaggcgaatcgagtgcggatggtaacgaggacgtcctaatcggtagactcattggtttcagagcggaagacggcgtcgcagatgtcgattggccgtgggtcaaacacctcatgatgcttcgggctaatttgtgtggcccacagggacgccggatgatattcacggaggaagcaagaggcatccactcggattttgcaccagtataatccattgacttgtggcataggacgagaagagcaggcaaggtggctgtgggtgcaatggtgcggaagtttggtaaatcgttttcatccataagcacaagatcaacatcggcttccggtgtccatgcgacgatctgtatagcataccagtctaaaaggtatcgagcaatttcagaccagtgagagtcggcagtcacgtcggttgggtcgatgccccagatggaggctcgtctaccagggtatgcttcgcgtagtagaagagtttgcgccaaggtttctctttgttggataagctgaccagatggttcgacgggcgggctttccttgccaacaggccgctctaggggtagagatacatgtacaacagtgccctccccaggacggctacgaattcgaatgcttccattcagagctttgaccaaactgcgaacaattgaaagtcccagtccagtaccgacagccaaggcgtcttcctgagcaaaaggcgtgtaaagcttgctgcgcaaaaattcttccgatatacctttgcccgtgtcagttactgtcaacgtgaccaagtcttcgaggccttgccgccgagatcgtccttcagattgactagatgctgacaaggataaagtaacacggccagagtctgtgtatttcatggcatttccaaaaacattcataatgatgcgtcgcaaagcccccggctgtgtccggtagacccaatcccggaatgagacatcgattacaacttcgacgttggaccggtgattctgcgactttgtttgatgtggcatcaatacgggcaggtccgccgaggcagtagagctctggccgtacacatggccaaggcagatgccttcaacgacttcctcggcaagaatggccacatcggtagccacgagcgtatccagatgatgcggcaacttgtcggatcctttgaaatcgagcggcgactctttcttgcgtctcattgtccgccaggtcctttccaaagataccactttgctgaagtcaagtacctggttcattgtatccagtaatgtccggccacaggaattgacagtttcaagcaatgagttctggaattcattgagatgggtgctgttcaaaaattcggcagcggccaagattccatgtaggggactacggagttcatgcctggtgaaggatagtaattagtaactgcggtcggacatgtcgattatctcctagagactaagaaaacttacgaaatactcccaatgaaatcacctttctggcgatctgcgatgagggattcaatgcggctatattcagccatgatagacgatgaaaacccaagcactgaactgagctcaactgagttggtgaacacctgggtctcaattgtgctccagcagaaacaccctccgaaccactgcgaagaaacagcattccacaaaggcacgaatataatttgcgcggcatgtgggaaatactgattgagtaccgagttttccgcagctttccgtcgctttcgcgtggcctttgagagctgtgtagcactaggtggggaccggctggtggtactggtgccacgaagggccttgtcttcggattcttggtcgtcatcatctgaggtcgagaggagcccatcgcggtgaaaggaccacagctttcctttgggatagcgtcgaagcaacaattgcaggaaagatcggtctaagttggcggcagggcatgtggccattgaccctgcttggggagcaaacggttcttcgtttgttgatgctgacagtacagaggcaggtccgcctgtgtcggaacaatcactacccatttcggtatccatcaaagggctattgttggcttctagaaaaatgaccccaccgtcgctacccaggtcaagactctcgcgaagtaagttggctgctctgcggaaacaccaagagttgccttgtgaatcatctggtggtagtttatttcggctgctgcttgtcagccattctggcagagagctctctactgtacccgactctacttttgaaccgttgtccaatttcgaactgttacccaatttcgaatcggacgagacagagctgaaggaacgcgcgtcggtgctgagtgatcgatcgttcggtggactattggagggcgcttgcgatgcgttttctgaggcatttccacgagagccaccagagccactcattcgattgtaagaagatgccggagttgctgacgaagggccgatactgttggtacgcgacgggtcgatattatccacgaaactagagcttccttcaacgaaatagctgagcccgcgggaaaggcgggcggcccggcgtccttcagaagcctgtctgcaaatcttcaaatagtccatcacaaccatcgataaagatcccagtgtatccttctccagcggtgtcaatccatctcggggttttgtgtccagcacgaaaaaacaacccaaattgatattcttctcggttgtcaagggagttccggcgaaaaagcggaagttggggccgttttcgacgaaggaaaggtgtttgtagcgctcgttttcggccatatcattcacgactagaaattgatagtttgcattctcgcggtcattggggggtaatgaaacagtgtcctgtcgaatggcgtcaaaatcgggaagttataggaattaacaatgcggtagagctcgacaatggctccggggcagccagctcgtagaatgagcaaaacttaccttgcacaaactccatgtcttgcgggtgtcgggtgcccccaaccagacattgtcattgtcgtcgtgaattgtcggatcgttcaaattgagagattttgttgcttcggcaatgatgtgttgcttatcacgatccaatacagttataaacacccgctccacgttcaggcgcaatgccgctagctgcgcaaacgatgtcatggtactattcgaggtacctagaatgagagcttctgtgccaactgcggtcgctggtcggaaagttgcactgctgtgtgaaggtattgagccttcggagatcggtggagtgattgtacttcctgaaagtgaagaaaaagggaatccatcattcaccggaagccaagatggaaccacctcagcttgggaactaggctggtagtaacggtatagctccctcgccctgcgatctgcattgtgtaggccaccatggcgtgctttaggaacagtcatagtttgccgctagcgttagaagactgaggatacagtgctgcatcctcggactccaagtcgagattggatcacgccggtgacaatcgaggcagggtggtgagggtcgagagaagtcgaattgtacaaaggaagtgactaaacaggtaggaaattgttggagggatgagtgtaactatattagtaagagattatctgagaattgggaggaaagtgggatttcttgatttagatacggctccccacaatagaacagtaagtcaggtgaagcgcagataggccagggaagactgggtgaaaaattcggcatgcacagccagggacccatcaatcaaggtacaataaggacgggcattggcaaagtccagtgatcggataaatgtacagaacatgattagtgggaacgagcgatcggtacacattgggagttattgtatggggtacacctgctccaccgtttcgtcgcctctctcttgggactcgtcttggaattgaccggcaacttgagatcgtcgcaccaagatggcgcaactgtcgctggatcagcatattgactggagcacgatggagtagaccggccattgggcagtacggatgtggacaagatgtggacaggagtaggtttcaatggctgtggcgtggtcctgtggcgtgttgaggctgcatatcattggctgacggcctcagatcacatgatttgccagggtattccgatccaagccaagtgggccaatgaatcttcacgatcgttctagtagaagtcgctagttgcaactggttactccttgcttcatgcttccatggcgtagcatgttatgtccacagtctcgatactgtcgaccaaggcttccacatacatgccaatgccatgatctgacacgggctgaaattagcgtcgcaagccctatgacgacagtggcaaattcttgaagcagatttattattcactatgtatctgaggaaagcgatcgtctcttccgtcatgggcctgaacacctaagatgatcaaaggctcacaatcttgtattcgacaacccctccaaacttaatccgcctatgaattatgaccggtcactgcaccccagatatacgccacccacgacccgattgtcaacaaaatcagagcactgaagcaaattatggagacggtccgggtgcgccggcgctgggttaccaagttgcgttctcgaatccgctcgatgatagccgcacccgatgtcaaacgtttgtgccgagtccactgtaacggcgccaagttatcagtcacaaacgagccaacaaggatagctgcaccgacaaccatagcaccggcagcaagaactaggtagacctgcaccactcggcggtatgaatcgtcatctgcgtcctgcaaagctcccgtgatgatccgaattatgatgctcatactattacgatttccaacgtcaatttgtgcctcgaaccactttttttgatgcagggatgttggatcaagcttacgcattattcatggtgaccttcaaagcatacgcggatccaaaaaccgattggtgccacagcgtggtgcgaatgctatcgatgaccgacgttggtccgaaggatacggcaatggcgtagatgccgaacgcggcccctgttcctgcctgcgatgttgcaaaattgatgagaaccatactcaatagcataccaagaccgcaggtaaacactaaattggtcagcgttggacttttatctgatccttgtgatcttggagatataactcacagacggacgcccggttgcctagaacatcaatgaacacgcccaagcagggaacgaggaagaagcctggttaatgtcagctatatccagctataatgagcacgcattccaccaatatcatacctgcgtactgcgaaagagaactataccacccggccttgatggaaccaacattgaatcgtttctcggccagctcggtagcattttggctgaagactgtcgcagcactcgtttgaaacacagagaaagacatgacagcccagaacatccatgggagctcgaacatctttttgaattcaaactttttgttcttctctgtcagttgctccttggtagctccatcgcgtcgtcccttgtaatggcgattacaatactggttgaagaaccagaacgctgcgctggccgcattcgtgaacagattcatgaacaccgaggtccaaaaaacccacgcgaagtttccagttttctataccttgtcagcattttcttaccaagttaatcggaaaagagcaatcacttttgcaatgatgttggccgttgacgtgccaataaacccgcctatcttgccaactgcgagctcaaatcctagagtggatgcaaatccattgctaggggggaaccaagacgagaacatcttatattgagcgatttgtgtggcgatatcgccgagtgcgagaatgactcggccaccgatcatgaagttgaaagagcgcacggtcgcggcggcagcgacgaggatggaaccgatggtatagacgatatttccataaacgatcatctctattcgaaaggacttgtcaggatattcttcgctgatttgacagactcgacaacataccagctccaccgactcggtcggtgaccacaccacttatcaaaagcaggaccgttgccatgaaattctcgctggcttccaaaagcgaaaattgaacattgtctatgttcatttgctgccagacaaaacccgtcagtgaatcgtgcaaatggacgtttccatagcattctgtacctttttgatcgtgctcttcatagcacccgttacgccagaactccaatgcgagccaaagctaatgcacgatatcagcgcgaccgcacacaactttgctgcaagcggcggtggcttctttccatcagagtcatcgcccggttcctccggtacgctgcggatgtcttcacggacaggcgccgacaccacgtcgaccgacttcgagtccgaagtatcgactcccattatcacaactcgatgctggaattatatagcaagcttctagcttgggttgtcaagggaaataaagtactttcacgcaaacttaaaaaaagacattcatgccattatgtactccgtactatttaaggatatctgagactggcaaatgttcaagacaaagcggagccctgccagtccgtgctacagcctacggtgagctgatattggtgcagatcagctcgaacgtacgtaaaagggcaaagaagaacgtcccctaggcgcttggcacatcagataagatggttgagatcggggccttgtcccgaaaagagcctagcgctgcgcatatactccagttcggagcaacgtcggtgaatttaacatttttttaagtctcttcaacggctttaggaaagccctgcgcatgcccgcagtgggaccctggggtgcaaggcttttctcggcttctccgggctgtcgtcagcttgcaaatgccgttatattttgctcaagtttagacccgcttggaatctttaaacgggttacgctgggcagattcagattattatttcgtgcgctctcaccagatctgtctgtcttcgtcgggtctcttgaactgtccgaggtacaatatacgagggtgatgcgagctggtctcgtcatcacctttgtcgactgctataatttgcgtaaagactgagatattggaaatttcaattgaacagcctccagatgtggcatatcaataggcttctaaaacaaccccggcagtgggcctctagtctagagatgtatgcagtcatagagaaaaagaaaagaatccaatacaaaattccacaaatattcaacgagaaaatcaaaaccgttccatgagccgcttgcgcacagtccacatgcgagctcgtttgccgtagatgtacataggaatggacatgagcatgaagaaaagctggataccaccaatagacaggaacacggtgcgtgaaccatcggaatcgagccaatccacgataaaaagggagaaaataaggccgtggagaacatctgcaagagaaaaaagtgttagaccagacagacctaacaaaaaatgaaggatagttcaacatactcttgctaaagttaagtgtcactagcgcctcgccggcatactggcgatagctatctacacaaaaagtgatagcggtcgtgctgcctagacagcaaccaaacgagatcaaaccaaagaagatagtcgggacaatccaagagtcaccgatctcagcactccacccaaaagccatcaggccgatgacagtagacaacgcgataggaattgtcatgacaagacggaattcaggctcgtagatgcccccattgcgcctggtcatgaaccgggcgataatgtcggatactttgcccgccactccagttccaaggagaccgccgataaacggcgatatgtagatcaggcctgtctgcaacggggtgaagttgtactgatctttgctctcgaatatgtgtgcaactgactccgaaagtacgatcagccacccgaccgatagtgagtataccactgttgaccacagcacggctggataggcgaataggatgaatggtcgcgcggcaactcggtaccagctgtcgtgagcgattcgtccattccagactctaagtaatcgggagtatggaatcttcggaccttcacgcaatcggtttgtgtattgtagggttgcaggcagcggtggcccggtaggctctagtgactcggtcctcgcaggtgatgcggcacctcgacctacggtgactggtcgagctgcctctaggtcagctgtctccagatcatctgggtgtgcgctaggcaaaagggcgtgaggtggtggttggaggaagtcatcgcctttctcattagccggggtcggcggttgaatgttgatttggtcaccattggtagcattaccggcctcgcaaacagaatcggacttttcagtctcgactgcctggcctccgccttctaggtggtcatccgcgaatccaaaatgcgcatgtttggacttcttcggtgccaatgctggatctgaatggtcctgttcggcggactcgtcctggggttggacatacgggtgccgccctcggaagccgtgggaaacgagccgtgggaaacgaggtcggagacactctgaccaaggccacgcgagcccttgtgtttgtgcacacgcgggcggggtgtacgatcccaaaatgtttcgggcacgaagaaaaagagcaagactaaacacatgcctgcaaccatggcgacaatccaaaatacccagcgccagcttaggctttcgatgatggcggcactcacgagagggatcaggttctttccgcctagtagcaagagcgtgtatatccccactcgataggctctttcgtgtaagaagtagatctctgcaattgtggcagatgggagacactcaactgggctcacggcaaatccttggaaaacacgagcaaccacgagacttgcatagttcggtgacgctgcgcaccaaattgccgagatcacaaacaggatggctcccaggaggtaaaccggtcgtttcccgtatagaatagccgtgggcgacatcacaacagaccccaggcccagccctaacatatacagcccggtggtgaaagcaaccttctgtgtactggtatcgtacgtggctgcaacctcgttgaacccagccgccaagataggggtcatgccgcctcccatcaggcaatagaagcccagcgagaccaacgcggtatctctttgccatacaggccagttcaaagggtcatttgcagagtcatctggttggggatcaagcacaaattgtccgtccgctgttttcttctgggttggaaccgtcgaccgcgttcgagaattagaccgcgagggcggataggacgaggctatagaagatgtcgatgtccggtgcggttgatgcctcattcccaagggttcattgcgatttgaggataagagaagtaccgttcctaaatcatgccagccagttgtcagacccgttccacaatatcatctctctgtgacaggactccctactcaccaggaacttcgtctgtctctcgatcacttaggattcccagtgttgatttggcgcgataagtctgattctcgctacgctcgaaatcttctttggtctttcctccaaagagtcgtctccagcgcgaagcagctggctgctgctggacggggtccaccgccgtgttctcctccattgtagaagaacggtcttctgtcggtgaggccatattctgttcgagaactaggaataaggattcgagatagtccctacaaaaatatgtgaagtatgtcgccgagtcttgcgaaagcgatcaacgcttctggatcaacgcaagaggcagtaaatgaacatcactcaaaggcatagtttgatggagtgagaaagacgaggggcgaggtagtagggaaagaaaaatctataagtggcggggggtgatatatagtgtcctagggccattcgggctccatgcgataagctaaaatggtggaaacacaaaaagaagacaagcgacgatcccaaagaggcagtggggggaggcggtgagagcgtctgaaggtactcgctgagtaccgtgactgtcgcccagccgccaaggttaaatcaagtcgccttgaggtactatcattttgatcttatcagagatcttcttgcatatctgcattctacacatccctgtccgtggacagaactgctggaattgtccgagaatgacggggcagataagcacaccattttcggacaaggctaagctccccacaatatgtcgttgataatgcacctcgtgggtcaacaatccgcgttgacaggtggatctttgggctacgcattgcacgagataacgtcgagaaaacaatacgctacactcacatatctgtcgacaatctactccatacagcgagggttaattgcactaggctcgaatattcccaatcgccgaatgcgcccggccattcctggtatatgccaagccactcaaatccggcgcttgtcgcgagagttttacttcgcgtgatctgcctatccataaacatatctttcgacgagttcaagtgtcactcactcaaatcatgttttcaataccccaaaattgtctcagctgaccgccgggagatgttggctgtcgtcattgtgcaggccaattgcgggggaaaggagccccagctttgatgaacttgtcataccgttggatgtcagtgtctctgttcgtcggtgctcgagctagcatggcgtcatgggtcagaccatgggcaaccttgtactacatcatgtttggaagaggaagatacaacacgccagttgcgtcaacggttattactacttctagggatgccacctgatgtgagtccacgaaggatcggctgggatcgacagattcgttttagggtgctttgattattgattgccatttgctatatgctgtgggtggattaagcaacttgctaatataagacaagactttctagttatcatttgatggcattgtccgcccctccatctgaagtaggaggaatctggcaaatccccgggaagtacatactccagtcccttgtcttctctgctgtggcattctcatcaagcttgggatttgctagtaataagggaaagagacggcgtatgaggttgtaccaacgtgatggcatggttctctctgacagaaacccttgttttccatccctaaaaatttctcttgtctaacctatttcaggcatttacacataggctttttcaccttaaggcctgcaacggctagtatagtcctttgacttgatactatgttgctgttctagggttcctatacaggtgtgtaggggaaaatggctaatattacgaccatagcatactacataaatacatagcagaccattaagagtacagttctccattcagaccatgcccatctacgttgatggccaactgcgtccaggggtgaatcaaatcccgccgatttccattacaggggccgtttgcgggcagtcacgtgtgaaaccccctttgacaattctagaccaggttcaacacaagtgctctttctttgctttgaattcttttgtcatttgcttatagttacttcatcttaatatttctacttctttcttactactccacattcatttcgatatccatctttgcccttgaaaaattgtccggtgtcgatcaaaccgtcccacgcgacttagtgtcgtgtcatcactcgaagaattctctcaccttggatatcggttcctccgctttattacggactataaattcaaagcgcaatctcaattcttattcgctcgttctgtgggagaaaccgccaacatcatgaagatcaaccagtcgcccttccttctcttccttcttcctgccatttcggccgtgctcgccgacacatacaatgacaacatagactctaaagtctcgcgggagactgtgggtaataatgctcgtctcgttgactcggatatagtcgcatccaatgtcgccaaaggggcgccggacgtccccgtggatggcaaggatggcagaccacacgctggtccgtgggtggaaaccaatgcagaccgggatcgcacaggtctccagggaggcgatgatgttgatccggtttctgtcaaatatgataccaatattccctcttcggaacacctgagcaccgaagaagggaaaatgatcccgcattcaaacggcggcgtgatggatgatccgcatcgggcgggcccgaaagaagggacacgaggaaccgagggtggtgtgtctgagaaaggaaaagaaagccaattggcatctgaaaaagtcccgggagggccgaaggaagcgcctccgttgccgcatagtgagaccaagaagttgggccccgacagcgacgacacaacaaccgggggtggaagtcggtctgcggagggtccgggaagccttggaatgctcggggtaagtctttctttatgttgcttgagtccgaggtccttcgttgagcaagtgggattaatgtccatctagaaacccgacgacctgcctgaaaagccacacgatattccacaccccaagtccccgggcacagcaaaggaggaccctataggccttggacacgacaaagtcaccccggggtcgtcttcgagttcttcctcgtcctcgtcctcgttgggccacggccacggccacgatcacgatcacgaccacgactctggtatccatgatgccggcagctcactacactcccttgtcttctcattcaccatgattctcgtctctgaaatcggcgacaagactttcctcgtggctgcgctgatggcgatgagacatcctcgcttggtggtgttcagtgccgcattcagtgccttggttatgatgactgttctttcagcagtcctgggccatgcagttcctactcttatccccaaaacgttcaccaaattcctggctgccattttgttcttaatctttggtgcgaaaatgctcaaggaaggccgtgaaatgtctccagatgaaggtgtgggtgaagagatgcgagaagttgaggcggagctcgaagagaaggagcacgagcagctgcgtatgaaccgccgtcgttcctcggttactcctcacaatctcgaagccggtcgcgctggaggccgtcccaaaacccgtggctccggaaaccgcctgccttcgcctccggagagcttgtcctcgtcctcgtcccgtggctcttctccccagccccgacaacggctaaacaatgtcgtttccggattaagcaatctattttccctacttctcagccccgcgtgggttcagacctttgtcatgaccttcctcggcgaatggggcgaccgcagtcagattgccactatcgccatggcagctggccaggactactggtgggtgacaattggagctagcgctggtcatggaatctgcaccgcagccgccgtactcggtggacgggccatcgctggccgggtcagcatgcgtgttggtatgtatcctctgcttgttttcctatatatgacacatgctaatcttgacattcatagtgactctgggcggcgctgtggcattccttctgtttggcgtcatctacttcatcgaagccatcttttgaagcgctgcatatccgcggttgtatgtgtccatggaaacttatcgttatagtttttggcggctgattttgtctaaaattcgaatgaatgtatcttgtgacatacctacgactgttttaatactataattacgtgtctggcccacgcaatatccaggttcacaatctcacatcaaaatggaaatccaagctctgagtactttgaccgtctgttgatgcatcaacgtgtcgttttctaccaatcacatagagacacggggcatgcgattacatgaggaaatgcacgagcctacacatgtggtcgagaaagtgttgtgatggccgatctcttcggtcttaggagtaattctcctacaaatgaacattcgtagttccaccacccgctatactttgaacgtgagtatccattctaaggcgttctaataaacctagatatgacgtaaattaggcgcccagtgtatgagactagagatcagcgaatataaaatacgaggtagatatcattcctaatttaacctttgaatcttcccgttcaaggtctagcgaactcttcaacatgtcatggtccaaagtgaacgaacaacgatgtgaacgtctacttggcgaaaatgaaacatttatcaagatcgttggtgatgccgctcgtccgttcaatcgtgaacactgggctatcaacatcattgtctcggtgaccccgctaggctcactcgccaaggaaaatcaatcctccgtcttccgcgaggcatggagggctctgcgtttcaggcaccccacgatcgccgcatatatcgtggacgaaaccaaatatgtctacgatatccccgaccttacggcacttgagaaatggacggcagaaaccttccaggtgattgaggacaagacggttgatgaagtcatcgcatctgccacgcgtgttccatatgctactatgaccttttttccccagacgggtgagctattgggccgctcgcaacactggagaacggatggcatcggtggcttgattctgatggacgacttccttgacctagccgcgcagtctgctgcagatacttcctccctgccatggggtgaagagaccgaccggttagcgtcgtgtgttgaggaggcatcgtccagtttcataacgtcggagaagcaagataggcaactaggccagcagtgtgttgcaagttttggtcatgccgctggggccatcggaatcgcctcgcgcgcaccagccgagacttccccaggtggtacgcgcattagccgtcttcatctcaccgagcaagagacaagggccgtagtgcaaggttgcaaggctcgggggctctcggtaacagcagcagtacacgcatcaattgccggagccaactatgcactagccactgctgaggatcagaacaaacactatacgagtacgatacggtacagtttacgtccgttcctaccagggccatactctggtcgccagtatgccagcacaatcctcacgacgggttggatgttccctgtttcgtccgagtcgtcatggtcagaccgagcaagggcataccatggcgaataccgcaaaggtctgagtcatgcatacatttcggcgcatcgcgaatacgccattgggctatgcaaccttcttcgcagcttgccgaaggacatcccttcgccgaccgatgtggatatcagcagcctcggtgtgtgcgagaggtttgtgacgagagaaaagggaactgcagagcggggaattcgcatcgatcgagtctcgggcggcttggatatgatcaatagacaatgcgtgtgtcatgtgtggacttttcgagaccagctttgtttgaacttggtatacaatgaggcattttacgatagggcggagggggattcctttttgcagactgttaaaaactccctgctgcatgaattgatactatagggtcctaaagttttataactcgaatgtatttgacccatgatcacatgatttcgtcgaaaattcaggtctcacgccaagcttttacgtaaaaataaagagggggtttagggtttttagtgcttagggggtttttagggtcttgacctgataatacaggcatcaaattacttaatacggactagcgtgtctcgctttataaataatccgttgttccgagtaacgcagccccgaaaaccctgacatctggccactccgctcccttaattctccaactctttcatcaaattcgtacacatctcatcaggcgaccatcagaagtctttcggtttcatccgaatattttttttttttccagttatatcaattttcaagcaaatcgcgcgaaagtgaataaataacaacaaggcttgtaggggcttgactcctgccctacattgcccaccgccttccatggcacgcatcacggggtcccgcatgacgcgaagtcggagccgagaagcaaatgcagcgtttatgccaaataaggggtcgttggagcgcaattgtaggtaattttccggttgttttttggtgtagcctcagcagcccttgaggcggatcaggcaactacgcattaagggaacatatgcatagttgtatattcctcaatgcgcgaactctctccataatcctttcatctgctcgtcccgttgcctcacctttcatcttgttgcctccatcacttctgtttgacagttgaatgtgttctgactttattcagggttaagcgggctggctgaggagccttctgctcctcctatcgggtttattgcacccagagatgtggtaccagaatcgcctgaaaaccaagaaggtaataccaatgtgtctggtacaaccttgtgtcccaatgatgcggagcccgccgattctcgagtcaccgatgctcgagtcgccgataaaatcgcgactcacttgccgttcgttcaacagcaggcgacccttgtcatgagcctgttggttcacccagacttcaacccggacagccttgcagccgagtcgaaaaagctcctcgattctggccacccaaatcgcaaacgattgaggcgattcgtggaagggctgatcgatgaactggaagactgtcctctttctcgtgatggcaagtccctattggacgtctcccaggctcgtcgtttgctttctcctgcgcaactagatgcatcaatcacatatatttacatgacaaattgcgctctgttgaccctcaacatgttcctccccagcattggcaccgaatcccagtcggaggttatccaacagctggactcccagtttcctgcatgtgtcttgggcaaccttccggacagttctacgccaaaggaacttggggcgagtgatactagcgaggctactttcaatcttgccttgagtatccgcacacagttcttcatcatggagttagaaagacgccaagatgagcaagacttcagcccactttccatcttgagacaggtctttgcaatagacctcattcccagcgaagattactcccaggatatccccggttccttccgggggttcaacttgccgggtgtctttcaggacgaggatggccatctccctgaaaatcttcctgagaagtttctcatcgccgtcaacgacagattcaatgaacttcacgaggagctttctgagtgggactccgttgatattggtggtctgaaaaaggcatatagatggcggtcgtttgaacgagaccttgcccgttggatctatgttcgtgacagcgaaattaaggaagacatcagacgcttgtcagaaagagtgcatagctcatccacacctcgtcgccttacttctgtcccggtcggaactcccaatcgacgagtatcgacagtgcctccgtctcctcagaaagaccgactggtgagcatggcaccggatgcaggtagagtgcccccgtctcctcagaaagaacgactggtgagcatggcaccggatgcagccagagtgccccaggcagagacgacaacgcaggcaggacagacagtaccggtggataaattgcctgaaaacaacgctcctcggccaagtgccgcttctcaaaatgttcctgaaaaaagtgtctccgaccaagtcgcacggccggcagcaaaagatccaggacggcgcaagtccaaaaggtatgctcactctactccctctctctgtggctactaactttcgtctatagcaactaccgagacccggcctcgttcgcggcactcatgagacgccaggctactagtcatcagcaacctgtctcgaacgaatcgcaagcgcaaaccatttctacaaagacaagcattgtggcccacgtgattaatcctggccttactgctagtcgcgcaaccgaggcttttgaaattcaacaatcccctgagctgggatatacagacatcggggatgactctacatacgtaaacaatgacgaggacttggatctcggccatggcccgggaccagatgttataatatcaaccagtcccccaaactccgctcgaatcagtcatgtcagccacaatcccactcctcggttatctgattcgcccagagatggaaacccacagcgatcagtcccgatcgctcggcgcttcctcgataagcagaataatgctagggttgtgtcgccgatcagccaatatgatactcaaagtactgtgttggggaagcgaaatcggaatgccgatgtcctagatgatgactcaactgacgggtcagacgatgagttcgagcaatataatcacaacgtcgatccgaggcgcagggtcgaaaagtctccacacaatgaacctgccgcgaagcgacaccacccccaggacaccgcgtggtctggtggagagcagtcgcaatcaagtatcaatagattgttccaccacaaccagtctagccagacgcaagtttctcgaaggatccaggcggttgaaagtgacgatgccgccactgatgaagagaccaccgttgcacagctcgaaccgccccctagtacccagggtcggtgggcagcctcccaggctgcgatggccaggaggagagttccgaagaccagccacaggtggacagatgaggaggatgaacgtttgcttcacctcatgtcaatttacggcactgcctttgctactataaagaagcaagacaacgcttgccccccagctgaaggcggtcccgtgcttgaacgtcgttctcaggtcaattgtaaagatcgtgctcgcaatttgaagagaaaatatctcaggtaagatatcataccttttcgtccttagtgtgatgtgtgcggcagttctaacccgttgttttacagagagggtcgaacacttccaccgaacttggataaggcagcaggttgatttgacgcattgataattacaagcagtcgtgtttgctcttgcgtttcttagcgttcatcgagatacccaatgagcatatgggatggcgtttttgagcgttcatttctaggctcctgctttcgttgttgcttttcgtatatgtttttttttttgccttgtatagggctcttctacgaagaaatgttgttaattgttgaagatttgtttactattgttttatcttctagattttcagtactgccaagattgaacgagttgttcttttacatacttatcgccacaaggaccatcttttttaatatctcttgttaatcacacaagatacgctctctaaatcaaaagacgtgcaatgaagtcaaagcaatactttcagccacttggcattgtccatgtgttcgttcctcttaggtatcctttctagcagatttggcaaccttctcaagatcctttcaatgcttttgctcgtttgcagaatgaccatccacaaggaaaagaaacgagaatggagccaggggaagtgttttacactgctgagacagagacaaaatccgagatcagatagaatctgtactgaaaggatacactgactcaaagtcaaggccagaatacaagagttcaattgctttgtatggaatgtatgaggaatcaacacgaagctaagagattatgacatattgcctgcctctgcctgttctgccaattgctttgttgagaaactttcacgtctttgatatatgacattgatagctgtcatagtgtctcaccaccaaagaacgttattcattttacgagtttcggcgtgcatcagctagataaagaaataaagattccatacagaatactctaacatgatgctacgtctacggataactcctatacagtacatagcagatgagacatgacctttgtataaaaacagatgtatttcctaagtctaactccccatatcaattcaacaccaccagaaaccgactacttgcatcaaaccagacattcaagaaacttgttcgcacgttattacattccacctctcaaaatgggcaacgacagaggcagaaacaagggcagaggtaggggcaagaaaagaagtcacattcacagtctgaaggagaacactgtcgccacgacggtcgcaacgaagctcgacaacaagcctaagggcaagatctcggacaagcatcactgtctcagcaagcgaccggagcatgttcggacttcacgatgccttcgtttgggccatgtggtccagtgtccgattcattctgacagcttcccactacggttgagcgagtgtgtgaagtgcaacagtgctgacaggcgacaagtgcaacaggagcgcaaagatagaaagaagtagatttttggtcctttaggttagatagaaatttcgaatccgatcaaaatcttgatgcaaacttcattcattgtacatccaatcccgccaccatctgagcacattcatctatcaaacgtgcaatgccctcggtagccgcagcgctccgtggaatattatgtcctccctcgtgttgatatgtcaatcttttcgtagactcagacaaataagctaattgcagtgaagcgggcaaccgaggatcaactcgcccataaacgtggagcgttgggatttttatccgcagctgctcgggcatctggacagtatccagtccaaatatatccgaggggtcaactggggccgccggattcaaatggaggtcagtatcaccatttcccccgggagtggtccatctgtctcttccccatttcaggatcgcttccttggatgctcgttcgcgcagagctagcttggtccgtttatcccactcgcgagcttcgtcagaaatggtcattcccagcgtttctaacaccgacaagaccggtccgccgcaaataaatacgacggctttgaaaggcaatggctcggtcggcttctctatctggtggaaccaaatataactggcaatcaggaggcaccctcgagaaaagcataccattccgtcgtatgggacattgttgtgttgggtaaggtatttatgaaaatcttgacaggcagcccgaatatcagacacagttgcctttagccaccatgtgtagtaggggccgtctgggtagcggagatccaggccggcggctggtttggacgtgaaagggccgtcgatgaaatgaaacgcatgctttgatggcggcaagtgggcggtgacagccgctacagatcgactgttaggttatttttgcttgcaggtttttatagtcagaaaaagcgtacccagctggtcctggaagatggtagctgaggaccctgtgccgtggatgcagagccatttcatattgtgtatttttcaagagtcaagacaggccgaggtaaactgtagtcaggtcaaggctaggcatcagttagaaaagtatatcgaaatctcgtatagaggtgggaccatgttgatctgcgctgatgatactcccaggttcgttacgcttctctttgggctttaaatgtgtcggctctgaagaaaaactctaaaattccaaagtcctaaatttctaggctgtggaccaagaagcatcaacggcaacataaacataccccggtatacagataggttggtgtcaaagagaagtaattggccatggcgaacacgtacgaaggctattagatttctaagaatgttgatttaatcttttctagcctttcccaccgatctgggaaccggatccacaggaaatacctgctggcctctccgaaaaacttcgtcaaaaatcaagttagagcgatttcgcagtggctctggcatgacccatgagttttggggatcgcgaagccacaaacgtagcaggtgacgacttgggatgttttcaattagccaattttcatgtgtacacgaccaatgcctgcttaccgattttccgaatcatctatatagctgtttcgagcatgtatcatgcttaggttattgatgaattgcatatcgcctctctccagcttcatggctacatgaaacttttctgcaagaaagtggagagcatccagtgcctccacctggatagagcttagcatattcatctgggatcgagcaccaaatccagaaaacgagcgtcgagagaactgcaagatgactcgttccggagctccatcgcaagcaggttggtagaacaaaagcggccggtgagtgatcagaccgggctgttttgcactaattagggttcaatggcacgtcagcaaattgggtctttttactggagcatcggattatcatcgacacggtttgcacacctgggtatcggccagtcctccgccaatacgcggagtaggtcggggcgggtctccgccagagaattgtagacagtccacgcactcgcgagaagactttcaccgccatttacgggcccacttaggacgaagagggagacgatatcccccacatccgtgtgatataccacttcgccatctgaatatgctgccagggaaaagttttgtgcctcgttggggcgtcgcatgtcggttatgtgggccaacatgacatctgccggctgcccctcgaattgatggtcttgccgaccgcggatggcggcaatgtgcgaagaaatcccgacatagatgatcatattctcttggcgagaatagcgttctactggaattcctcgaataagtgtaaacccatagcctgagtgcagattgtctgatgcggaccgcaggatcgagtgcaaattcggtagaggaaacgtcgacgggtccagagtctccattggctgattcagttctgcagagttatcagtcttgagcgaggaatacgagagtggctggctgactttggaaatgcttgagtgctgcatctatctcgaccagctgcggagcttgtaaaatcaacaggtacggactctcagagcctgcagcgtgattcatcgagatatttcctccttcccaggccatatctgcggtcaatctctggggaaatccatgaggaaggattttttccactggtccttcctgtgcatagcggaacatacgagtgtcgtactcgttgcgatctggtaaataagggagttggtcgaatgattgtgccatggtcgccttgagatggagtattacagttggaggcacaaaatattgagggcatgaacagagtgaatgctttataattacatgggatgtctcaggatccatctctctccgaaatattttacagttttgatcctgaagggacgtatctcgaatgtgcggccgtatactccgcagtcccgcaccaactcttcgacatcacctaatgataatccgtaaattattgtagttcggtgaatgtgacctatcgagagtaaatacacgggtatgtgatgatctacataaactgcaagataattggcaattcagtcccgagctcagctctgggatttcaaatggatcagacagaagcagccaattgcgaagcttcaaatgaaaattactattgtggaaatgcctaccgaggctatttgggattatttaagaaagacaaaacatgaataagtagttaatacttgggaacatattcattttatcgtctgaagttcctaacaatcaccagaaaacatgaccatcctctccaggcacgatcgagcattattcgaaacaacgaaacgtgttcttgctgagattgtgaacgaaggactagtttatgcaaagctagagtccactgcgaccggagagccacagatactgtgcctacagagtatactcaacccccaggatggaaccttggtcaaggtgccgatcaaagctggcgctgtcatcgagacaaaagatgatctcgtggtgtctgttgtacgaccagacagcttacagccacctgtgattattgcggataccaggaacggagagttggacccagggacactattcaagttcctgagtacttcgttcagtgacgtcgctagtgagagagtagtggatgagatcgttcaggaattgcgcaattcagcggccaatcaaggtgagatagcattgatgtcacactgtcttcattgtactaaaaatatccagagaaatggctagagattagcgaatcccagccattgttgagcctcaaggatagatctgctagctgggagcggacattgatctatggccacccgagtcatcccgtaggatcccttgataccgaacctgctggacaaaattctgactttgacattgacagtaccatcgattgtgttttgctcaagcgccgctgaagcccgtcaccgccgcggatatccctgagatgctcaacccaactctggcatttgtttctgttccacgtgccaatcttcgtgtgacaggccacttcgagcaagagttgcaaccactcctggaaaagcttgaaattccaaaaacaaccggtgaccgggtggttgtcccttgtctcgctcagcaattaccctctattcaccagaggttcccggacaccatcgttctaaagcttatcgcggactgtgccgatgcgcaggcatcaatgcgtactctcaccatacgaccagagttggagttcaagtatcacttgaagctctcactggcttgccagataacctccgccctgcgaactatcactccgtggacaacttgtggcggcccggtccaaacagagatcttggaaaatttacttccaaaggacctctgggttttccgagaggtagcagctgtatcaggcagccaggaagatttcaacgaggcgcgccacctttcttgtattttgcgagatagcctggagaccagagctagggaaaatgatgaaactcttatcattgccgcagcattggcccagaagcctagtggagatagtcgtacatatgcggagattttgtacagcttggaaacaatctcccagaaaagggaatggttccgaaggtaagtgcaacgatcagccacaaatatcataacagatgctgattcccgtaccaacagatacgttacggtcctatttgagcttgtgcttcccccattggtccagtatggaatcggactagaaggccatgggcagaatcttgtggcccgtgtttgccgtcggacaggtcaaatcaaaggatttgccgtgcgggatttcggaggagtgagaatgcatgtcccgacgttgcgaaaccatggcgtgagatatgattcgctgccccccggagcagccaccttgacggatgacttgcagaatgtgtggagcaaggtagaccattcacttcttcagaaccacgtcgggctcctgcttgagtcattgggattagagaaccatggaggatggacaattacccacgaggtcctatcgacagtcttggggtcggataaaggctctcccgggtataccttgttcgaatacttcaccaaggacacaatgcccttcaaatgcttcctgagaatgagaatggagggtaaataccgtgatgtgagtcttccgatgtggtctgttgctcaaactattacgaatctctgacgtttttcccgcagtacattgagagggaggttcctaatttgcttcatgtcacttagcaagttcaaggtggatggaagagaacgcaacgcgagtatatatcactgggtgaattgggaggttgatttggtcaatacatgtatttctttcgaaataataccccgcaggaccgcccctcttcctttctctttctcttttcttacaattccccgacttctacaccttgaacatacagcgaataccttcgctgtgctctcgtaaacctgatgtggaagaatacaaaaccgacccatattgccttccaagcacacaatcgacatgtcctgacctgtttacaattcgacgccgacaagattatagtcggtagtgacaacgccaaaatcagcgtgtatgatactaagaccggagcgcttcgagcaacactggaaggccacgagggtggtatatggggacttgaataccatggcaatactctggtctctgtgtcgactgaccgatccgtccgagtatgggacattgcaaaagccaagtgcacccacgtgttcaaaggtcacacatccacagtacggaccgtacagttattgctccccgttcaaattggccagcatccagacggtacgccagtgatgatgcctgaacaacctctaataatttcggggtcccgtgattcaaccatgcgggtttggaaactccctcaacctggcgacgaggagtatttccctcccgctcaaagtgacgaggagtgtccgtatctcattcatgtattggctggccatcaacactccgtgcgagcaactgcagcccatggggataccctggttagcggtagctatgacagtaccgtacgagtttggaaagtatccaccggagaatcactgcaccggctagaaggtcatcgatacaaggtttataatgtatctttggaccatgagaggaaccgctgtattagtggatcaatggacaacatggtcaagatatggtctcttgatacaggtgcgttgttatataatcttgaaggccactcatcgttagtgggcttgcttgatttgaaagatgatctgctcgtgtcggcagctgcggacagtatgcttaaagtctggaaccctgcgaatggccattgccagcacacgctgagtggccatacttcagcggtcacaagcttccagcacgatggtcaaaaagtaatctctggttccgatggggaagtgaagttgtgggatatacagactggtgtgtttgaaagggatcttctcaccaaccttagcggtgtctggcaagtccagtttgatgcccagcgttgcgttgcagcagttcaacgtgggaatctgagctatatcgaggtaagtactcatctaaactgatgtgttgtcataatttgctgatttatgaagattctcgactttggcgcttcccctgactccataccaactggtcggctgggggagcggatactagtcgatgagctaggtcatgagatcgaaagccggaagagacaaaggcagaaataatctagtgtttgattagagtttaaccacaacgtcctcaaatatttgtactatcttcgatattactttcttaaaaatgccattggcaaaaacgtaaattctccgaaaaggatatcggagtccatccgggagtaaataatgaatgctaatatagtctgctcatgcaaccccaaattaaaaacgagtgtggaatgcctatcccaagacaggcagtaaatgcaacacaaatccgaccagcagatctaacacaaggaacagaaacggtatatcatccctaatatcacaaacgccctgttgacgaaccagcgacggtataactgtacatgcaatgtagagtacagggaatcaaaatgacagtatatgcagcttctatctcaagacctgaaggttaggagcttcacagaagcaagcccatacccacaaaaacagcgccaagcagtgaggatcccgcgcagactgttccagcagcgttgtttgtgggcgtgggcgtggcagttgcggaggcgaagacagcggacttcgataaaacgttgccactcttagagttggcagttgataccgcggtcacgatgctggttggtgggttggctgttgaggcagcgacaatgattccgccagctgcggtggcagcagtgggtgcaatagtagtggaggcattttcagatgcagacggttggagattctcagccgcctggatgagattaaaggtatccgcgccgccacctagataagtatgctgtcagtcatgatcttgtttccatatggaatattataggtgactcacagcttcctgcaggccatccagcgcagggcacatcacatttactgtcggcgatcttagccgaatctgggggcatttcgttgccgcagtagcacatgttgccacggctcagagcagcgaccttgtaattgtcctctgcgcattgggcctggcaatgtcctggtgattggtaggtgtaggggccctggttcttgaatgattcgatagcagagtagcagcccatactggcggtggagctaagcgagtatacgggaagagctagggcaagcgcggacaaaatgtagttggaatgcatgattggtaggcgaggtattcgatcaacgaattaaagagtgaatagttgttttgagaaatgaaggaaagtatacgcaaaagagagagttgtttcaggtgccagggaggaaaaaaagggtcccatcaagcatctttaaggcggccgtttgtttgacacccgtcggttccatttttacgagtgtttttctgtggagtaaggctgggactgacgacatcgatgtccaatcgatcgactaaaagaggcaaaggattattctgaaacactaagcgacatgttctattgaacccgcaatggggctacatagggttcattggcttgcgagcggacgatcgccgatcggcatccccaggtgtggcgtctcgtttcccttttgagcgaccaatgacggcggacggctactcctgagtcaaaaagcatgaacttgagaaggagttcgcgtgtttctggtttggcgcttgccttgatcgagcataggtagagtgggtttagggtgttgcatttgtgaggaatctggcattgctggtcatcgctggtcatcgccggtgaccccttgtttctccttttctcctttctgttagtattctggtatcctgggtattccaaatactcttcatcttctgcaagatatcaggacagtcattgatgtgtatggcatagtctaattgggaaactggacatcgaaattgagtatcaaaatgaatttggatccatggttaacccgaaccttccgcactgttggatgccttgtatatcaggcaccttaccttatctaagacatctcaattcgacctggcggcccaatattcgggcaccctttttgacccagggatccggaacctccacagggggaggcaataatgatcattgggttattttactcgttcggattgcgatatttgtacgttgtacccgctggaatcttcccgtcaaatgccggtgagctgagctgtatatattgtccacgggtactccgtccgtactccgtattccgcatacctatcaatgcctatatcaatagtcgacggttcggattgaaatacgagctaataaactaagtaaggctaggtgcagggatctgccaataattccagttgataatgaaatccgacaggaaacatctccatcgcatagcgattaagcttcgcggtacatcaactgacattgtacgataccgttgacaattattcatggctgagacattaaggctttctttatcttagctgaacactagctccgatctattacacggacacgaaaccttgagctgggctgagacatttcctactttcaatacacttgaacatggaaaaccaaagttgaactgccaatcccaaaatgatcaacatgtaactatacagcacacttaccccaactctcggcaaaacagctaccctaatagggcaattcacatcggctatggccgccagccgacctcgggagaggggaagatagcaagaagataagataggccttgacgtgcttttgacatgctctttctgggctattgtgaatcccttcacgtcaatttcgaagacttataaatattttgattcggaagtattgaatcaacttagtccgaccatgaaaaccctcgctctcctcggcctggctgcagtgccatcgctagctctcaatatccccacacagcagcatctcttctccgacaacgatctgtcgggtcattataacctgctatcaagcccatctacacgggaaacctgtccccagccgcccaaggtcagcctccccgatgatggcctgcactcgtcgcagatcttcctcaccgatgatgctttccgtgctcgccaggcaaagcggctctcgcgcgcggtgcagatcccaaccactgtgggtgattatatggaagacccatacgatgaggcattcgagcctgtagtcaagttccaagcgctgctggaggagctgttccctctagtgtaagaaattgaccaattgtgacccgccatgaatgagaactaaacaaatcacagacacggccgcggcaaggttgagcacattaaccggctcggtctagtcttcacctttgaaggtgctgacacttcacgcaagccgctactcttcatggcccaccaggacgtcgtcccaatcgacgacccatcagactggactcacccgcccttcgaaggtgtctttgatggcgaatggatctggggccgcggctcaagcgactgcaaaaacgtccttatcgggttattgtctgtagtcgaagacctgctctcccaggactggaaaccaaagcgcacggtgctgtttgcctttgggtatgacgaggaatcacacggcttcctaggtgccggggcaatctccgcagctctggagaaaaagtacggcaaagactctttcgaatttatccttgacgagggtggaatgggactgcagagcctgggcgatgagtccgacgccaacggcgagatcttgtatgctctgcctgctgtcggtgagaagggcagtctcgacctcattatcaacattgccgtgcctggcggccacagttcgatcccacccgcgcacaccggcatcggcatcatggcggagattctgtacgagctcgagcgaaaggagctgttccccgcctggctggataccgaccacccggcctacgggatgctggagtgccaagcacgatactcacccgaccacgttgagccctggctatccgagaaactggcagcacatgatcctgccgctcttggcgaagctgttgccagctcccgcggtcccgcagtccggtacacaatgcagacatcgcaggccgcagacctgatccacggcggtgtcaagacaaacgcgctgccggagaagatctctgcggttgtcaactaccgcgtggcattacaccagacgcccgatgagctgcgtgagcgcgctatccgacttatcggccctatcgccaaatctcacaaccttactctacatgttgccttccccggtgtggcggagtccacagaaggagatgcgagcgaccgtactctcaagctgtcccctctgagtgttcctctttccccggctccgatctccccaacagatccgctcacatcgaaggtgtgggcgcactttgccggagtggctcgtagtgtttttgagtcgcacccgaacccacttgccaaaactgcgtctggttctaagccgacggttgttgtttcaggagatgtcatgactgggaatactgacacgcgcttctactggtctttgtcggagaatatctaccgctggagtccgtcgcgggctggcggagcgctgaatattcatactgtggatgagcggattcgcttggatgtgcatcttgaaggcatcatgctttactacggtatgttattttttcgttcgttgttccttttgggaaacttactaatttaaattagatctgattcggtcttttgatgcctgggatggagaatccgagtgaacatgcttgtccattctcagatactttgacacgtagatatgaaagtctggtatatacctcacatttttggtccagggctggatatatctcatttcgaatttagcaaatagagcaaaatcagtccaatagatcacttgttttttcacaccctctcaaaggtgccatgcagctcaaaacttcatattgggctagtcacaccgagtcaacgtaatccaagcatgaacaagatgtaattgaggatgatttgcacatttttgaagggacataaacatatagtgataactattgaatgttgatcaccttatacttcggtgtatgggataccgcagcacgtatttgttatataattgatatttcccagtgttagagcatctgaacatatctccagatgactggagagggtgtagaagtcacagattcatgtatatccatcaaatactcaaatatagtatgtgtatgcgaggatttcacaaaactcgcacaacccatgccaaaaatcaaggcaatggatgggtataagcaagaaaaagacattatcaagtgtggagtcaacgaagcgaacggaaggtatctggcacgtcttccaccacgactggtggcagctatactgggccaggacttgaagcgaaagtctttgcgagagaagaaaaaggcgaccggcggggaaaagacccgaaggcattataagtgaaataaatcaacaagaagcgaaggggtccgctagcggacgaggataggagcgaaggaaccaccgataacggggcgagcgatgaaagtaattccgggataactaggtttcatcagcaaggagcattacaggcttgagagctggttgacttactctcccgagatagtgtcgtacagatcagtcagggctcggttggtcggtgtctcattgatccaggtcgcgagatccttaatgaacatagaccgagtatcgactgaactgaccgctgccgcgaagcactcccagtcacctatcgaattgtgagtacttttctaatatggtgagccgtcagggtgtttaccttttgtgtatgtgtggcgggtatctagaggcacaccgtacttattttcaacggtcgggtagaagtcgctctgcatctgatagacagactgtggaacaaagtccaggcccagctgggcatcagcgaagatattgtagagcagacctgcagaaatggtaagcaaggcttcatagactggaagggcgctggagcttaccatggctagcggtgtcgccgtacgacaaggtggtatgtggtgggttagcatccttggcaatagccaggtcctgccactgagtgatgtagtcactggcgatgctcgagaaattagcagcgtcggcggtgtggccagtctggttggcaatgactgccatggcctgaataccgatcatgcccttgatcgcgaggttggtttggttgctaattatgccggttagttttggatttcaggaagggcagggcttactcacgctagagagccagcaaagtcgtccgtagagatctggttcgcaggataaagcgagtcctcgaccaaataactggtccactgcttgagtagagtgtagtggttattcaaaaagtcggagtcacccgacttctgcgcataagccaaagacatgatgaccatattcccgcactcttccaaaggcattttctcgtcgttgccattggggtggcccgtggcgttcggataagccgagcctaggtcgtgcatggaataattgttgggatactttccagcctcttggttttcaaacagaggagtgagcacgagtttcaggagttcggggttggtgtacaggaaaatcggataggctgggaagataacatccacagtattcatgttgccgtcggaagagatttccttcaggaacagatactgtttgtcttgtgtaccacaaagctgggtagcagcgaatgcctgccgaaccgcgagcgaagttatagtgaggtagtcctggccggctgtttcaattgaatcctgggccaccctgctatcgaaatggcttgcgagattgctcgattccgcatgatcgtggtggaagaacgaaagtgcggccaactctgtatcgaaataactcttccacaaggacggtactggggcatactgcgaagcgccttcgtactgaatagcttgatcctgtgtcagacctagtgagaagagcgtgctaatgggcgacgaatcgaccgagcccagatcgtatgagaacccgaatacgggccaggtggaggagatagctcggaaattagtgtcgacgccattggtgagttttccattgctggcaaactggccccggacgtcggtatccgcaccagactggtgggtcatgtctttcgagtcgtcggtggcccagtaccagttaccccattcgccctgctcattgttttcggaaaaggccaattgagtctgtcggtgtaccttgtggtaggccacaccgtcagtggtcccatactcccattctgcaatggcattccggtcacccgatacccattctaacatgtcgtcagcccccgcatgtaagaaaagagaccagcgcactaacctgcagagatgtccgcgtagacctgtacatcatgcgcctggccatcaagagaagagacctcgacattaagatacgagaaaacgagggactggcgcttgaagtcggtgggtgtaacaggcgacaaaaaagtaatgttcatttcaagcttattctccacgttcatagtgaagatacttttagtcgaagtatactcaaacgctgtctgattgacggttttcgacccaggaaggcccatccaagtataggtattgccatcgacgcggatcatacctgtccacccggtgacctgattcctgtatatcattagtataaaattcacatatagtcaaaaggaacttactgccaaaatacaggccattgaccagccaagtacccaccattaccaccatcactccctacatcaagccaagtgctgaggtacggtgacctaacagcgagaggtatagccgggggacgagcaggggagaaggtcgactgtgctccaatagaggacacaaaggaagcaaccagcagactgaggcggtacagctgcatgatgacagagcttgacggaagatgggatacacaaagtccaaacaagggcaagattgctctgttatttatttgcaggaaagggaaatgagctctagggagcttgactgcatagcactctggtggggccgaagaaagggatcggcttatgtttactgaagaggaatgccagtgacatttttatagtcaacctcaacccacgaagagagggggaaagccaaaggcccgtccgagacccgcatgccagaatgcgctctctacggaggaatatcaaagcggcttggtatatttgtctcaataaatacgaagtgctctaatctgctgacctccctcaaggcccgagtggaagaagattcatgctaaaggtacaaagtgacgttagggggatcaggacaggggtattcaagtggagtggctgtggaatggtggtggaaatggctcaattcaaagtcaaatccaaaaacgcggtctacatcttccggaagtaacggcataccttcacgtcgcatggaagacaagcagcggtctatgcggatcgacaaagcgatggcccagtaaacaagcgcatcggagtaatcccgacttctagttcggtgcgcgccttgcaggtgacagacttcatagcggtatggtggcgcaaataaaggtgtagaagaggactggtgagaaaaagggatgcagctgcgaaagaaacggaggtttgagggcatcgccgataggcccaggacaaataatgaggcacgagtcaagcgaattgccaagttgatgtccttcgtgatagtatcatgcggacagatcgtcggctttacttcatgcatgtaatatccgataaatctgcggggaaatggcgatcagcagcgtggcattcagcccatgagagaacagaatgaagatatttgaatagccacggtatctagaggacggaagaattcgggaagctgcagagaataatcatggcttttggtctcaaatcatatgggttccccttgcagagtctgcgtgtctctgcgtgtcagctttggcagcggcagtccgatcggagacaaaacgacttcaaatttctatcagacctagactcttgtgttgcatgaaccgtgtatgaatacagagtacatgggccgaggtcgcgtgcgcgaggtagtacaatgcatctagtttgaagctcacgatccacttcctattgaacctccttgctgcatatgtcggcatattcggttgccgacatacattttccaagacaagaacataaaccttacaattcaatagaactacgctttcggtggtctccggatattatcttcctttttgtcctccggtgaaatacttcgtgtgtcagattctagcctacgaccggccttgctactgtgccatcgctcgaagggttttattacaccccgtgatcttgcattgatgattatttacgtaagaacaacagagtgggatcgtgctccgcaagtccaagggcttctaggcaaaaggcaatgtcctcaacctccaatcctccggagtaatggtctattgtaagcgaactctcgggtttgttgtggcatgtggagttccccctatagggtttgatactcctgccgatcaagaatccaccaccccactaaattgcttgtatagcatatagcacgtctatttaatatgcttttgtacaagagaaatttactaggaaacatatatgagatgggcgatgagcattatcctacacagttgcacattggttgattacctcttcttggtcacccagattgtataactacctaactacgtacatcgggttgtgaggccctttattttgctatatcttagtagtttaccctggagctagccttccagctgtttgcacgcccatctagcctctctgagattctagccagagaaaagagaagtcagatggctgtgcaaagaattggaaggctagctccagggtaaactgctaatattacagcaaaataaagggctttataacctgatgtacggatacaatctgggttactaagaagaagaagaagagaatagatggaagatgatgatctagccactgccatgaagcttctctaaatagcttcatgtggacaaagacacaaagatctcttcctctagaatctaggagaagcatcttctgcaagatgagcaaagacagagaccgctaaaccgggtctctgcagactagataaagaagctactaacacaacaggaaatatgcaaggagagtaagagactgccaaagagaggtttgcagaactgcataggaaagagcgagcatcggacaaaaacgactctgcaatgggaaccgtttcgaggcctgtttttacaataacagcatggagaactacacatagtatagcctttttccatgctatagttacttcaagacactcgcattattactaatcatattcatcgggaagccctacctaagaagcagctacacgcaatgcacgttagatatcaggagacaatcaaaagtaaatatacaaaaccaaagccaaggatatagagagcatacacgcaacaaccaagcaaccaggtacaaagtaaaaaaaacacacgccttcagcaggatccgaaaagcacaatcaagcattccgcgccaactcaatacaaaactccccccaatcctggcccccattcagcggcagaatctcctcggcaatagcctcctccagacgctcatggtatcggcgcctgtactcattcttcacgaggtcgagatgtctaggctcccaatgcagccgcacgagacgggaaatgaggagctctgagcgctcgcggccggtccgggattcgcgcagggcctggtggaggaggagggcgtcgcgcattggtctgttgattgcgccgttgaggatgtgggctagggtttcgccctggtatttgttagtaaggattcgatttcagtattgactggaggggcaagatattaattaagtacgtaccaccagattccgcgacttcgcaatcatagccttcgcaaaattatgccggtagatatcctcgtacgagcgcagcacctcgcgcagatgcgaatcactcctcaaaacaataatatgaatcatagcagtctcgccgccctcgcggacaatcgcgcgatgcaaatcctgcacgtcggcgcgcacgagccgtctatccagtgggtcgcgatcatcctggcgctggccctcgagcgcgagcaaaatcgccatgcggaacttgtccgcgcgcagctcggagcgcatgcagcgctcgagactgttgtcgtagcggctgtcgcggaaggagtgtttgatttcgcggattgcggcgttcgtccggcccatcagggactcgattaggagttcgcggcgggatgtcccggcttggtagtagcagttcgcccagtaggcttctgattcccagcggccgagggcggtcgcgtagcagactttgccgaaggaggaactgccgagtttgaggcggaggtgtttggcgatgttgattccttttccttggaggcggacgcggtttttgtattcgtggcgcaggaggatgatttcgtcgcttgttagccggggcaggatctggatcatgggtctactgtcgatgttgcgtgtgtggctgagggcggcttgcagggcggcggcatcggggccggcgtcgtagaaggagacgcgtttccggcctgtcgttggggagacgaggactcttgcgtcggagctgcgggtggaggagcctgagtcgtggcggccgtggctgatttttgggtgggtgaggcgtttgtcgtccttgcggttgtcgcgcgaggagctgcgctctttgtctttatctttgttgccgcgggagcgggaatctttctcgctgacacggacagacgagcgcgagcgaatgtgtttgctgcgtcggcttgagtctgacgctgagtttccgtcgagtggttcaaggtctgagatttcatcgtcgcggatggaggggatgatgatcgcggatggcatcggtgagatggactggtaggttccatgatacggctccagcagcggactacccgggggatgagccgaattaggagcactggctcttccaacagcgagattattcgacgaggacacagagctgctgtgtggacgagcactcgaccgactcctgggcgcgatctccacaaactgaggctcgggctcctgtttattccgagacggctgctctggcggttgctgcgactgtccctgtgactgcggctgcgcctgcgattgatacggatacaaattctgcgacgactgcggaatcggcctagaaaactgctcatgggtagcagccgggtatataggcctaggcgcgggcggcgcgggcggcggcacaggcaccgtcttcgaagaatacttcacattaggatcaagctgcgcatactggtacacgcccggattcgcataccccacagcaggctgcgaataaccagtctcactcgagggagtacggtaatgcgaaggcgcataagccgcactcgtcggcgcatacggagcctgctgggccggtaaactagtatactgcagcgacgtagctcccgagccagcggggtagtttgacgctgcagggaacgcgccgggcatagtagtagccgggccaggctgcgaggagggcggcacaaacccagggcgttcgcattctggcactgaggcccagtctactggtgcggtagcgtaggttggttgtcgcggcgcggacgcggaggcaaactgcgtgggctgggcatagctgtatggattccggcgcgcgtagctgggatggttgcctggcgcatcgccgtaggctagatcatctgctgagtcggagtcgtggtgattcggattcggattcacatccaaacgactgtcgcgggctggcgacgggggttgacgatgcgacagtgacgaagcggcggcagaaccgcgctcctcgtctgagtgttggtagcggtcatcgcgagggtccacgtcgtagcgggcgcttcttggggcgtgcgagctgccggcgcgcgactcatctgggttctcgcgacggcgcgagctgataagcttgtattggcgctctatttcggcttcttcgtcggggctgtaggtctttgctctggggatttcgacggctggtgagcgcgaccggcgagagggggagggagagggagaggggattcggttgtcgcgcgaccgcgatcgcgaccgtgagggctcgcgggcgggagatttggatcgggtttgcgaccgtgggtcgttcacttggagggacatgtttggtgtggggttttgatcttggtatgcaatgtgtgttcaacgggtttatttattttctttttctgcgaggtcttcagtcgcataaagaagggttggactggagggtttctttgtgtgaggttcactaggccattctataattatagctatgaagcctctttgttcaggtgaattggaaagaaaagaaaggaaaggaaagataaagcgaggtttaatagccgctggcattcgacggcgccaacttacctcgagctaatctgtgacacttcaccctcatgtagcaagtattagcggctcttattggcttacagctggactgaagatcgtcgtgaccagcgcttcagccgcagacatctgaccaatgcgcatgtcagattgcaaaagaggaggtcattcatggaaggttactgtagaattacggagaattcaagataaactatcaaattaccgtgcaaacaatagatgaaaagcactagtacaggtttcggatttcgaaccgttttgtcagaagagaaaggaaagcaaaggtatgacataaaagaagccctgcgaggtgccaggccgcgaagaatgggggtatgtgcagaagagaaaactatgggaacagaagaaaggggagccgtttatcgcttgcgacggccatcgtagggtccctgacgaccaccgtagttttgcttctgggactgcgtcgtctgtccgttgcggttgagacggttggttctccagcgctcataccagaccacgcgactggcctcccgcagctcggagcgccaatcggaaaagacggagtccttcaagcggacaaagtcacagtgctcggcatcatatggatctgcgaaaccccaggggaatcggcgaccgacgggtttgtcgccagctgccagcgagtggggatccggcgacagaatcgagaagggaacgtgctggttggtggcctgcgacgcgttggaccggcgagtgctctggctgcgctgcgacggcgagccggggacattttcggctgcggtctcagactccttggcttcgctggctccattctcagtctcggttttggtctcaggctcttcttcatccgcactttccgacgacgagtattcatcttcctggtcctccaatgtcaagatctcaagggggtcgatattggcctgcttcaagctgttccagaccgccttgcggagatagctcatgtgggcggaggtaatcgtatccgccttgctgatcaccggcaccacagtggtcttgcccaacacggtgcgcaacacctggatatccaatttcttgtccagaatcccaatgacaggcgcatcggtgggcttggacgtgccattggcagcacgctccgccatggcgatgttctcatcaagacgcacaggatccagaagtaggaaagtgcagtgaatgtgggtatcacgaataccgggagaccggacaaccttcatctcctcggcgagggtctcctcaaacttgctttccaggaagcctgtcacgccgcgcagctgaagatctgcgatgttccgctccaggcctacagagtcccacagggtaagtccgacacgttctccgtcgaactccgtttccaggtattgcgacgtgaatccttcccaggctgaggtttgccgctcaagctcttcgacctcctcaggagtgcgtgaggggtgcttgtgtgcgggcatggtcagggcactgcggaggaagttgaggaatgaggttttccccgagttacgagcgccgatgacaagcacactatacaggttccattattagctggtctggttattgatgtctcttcgcgactcacttgtatggggtagggtccttgcgacggcgcacacgacgggggctgttgacggtgctgacagcactgctagcatagctgtaccgaccacggtgggtcatgctctcagagcgcgcatagggatccacggtgtttgttggcgcagccatagatggcgcgggggcttcaggctggcgtgttcgggctgcgaccttatcgcgttcctcacctccaaaagtttccagttgcggggcgggggaaagatcaggcaagcggggagggaccttaggggcataagactcgcgctgacgacgcatctcatcttccatggcttgggttttagacatcttcttgcgagctttgtcgcctaggggttcggtggatttagaacgacgaaggaagccgagggaggtgcgacggttgatgtctgtttcaggtcccaggcgcgtggaggttgccattttgggatgggcgtttgtctgttctttcctgattaggttgtttttcttttcttttcctttctcttattatttgctcttattaccaggcagtcctgaaggtatctctatcgggggatctcgatatcgcataacccaccacctgatgtcagggggaacctcgggaactgccactcaccaatagaacgagatatatcggagtccaacagcgcttatagtgcaggtcagatccgatggcgcgatttgaaactgctctgaaacagaatcagacggaatcaatccacctggtctgcggatgtatcgggtttctcaaaaacgaaggtatctgcaacagagaaaggaaagggaataagcgagagtggaatcaacacaatacaggtgcccaaccagtgggtgaaggaggggattgaaattcggccctgaacagagttcgaacttcaagctctttttttggggatgttttttttcttttggggaattgtaaataagcctgctcacagcatccagcaacagcggcgcttggagtaatgtttgaaaaggggaggagagaagagaaattcaattcacactaattctatcgggaagatcgagatgatattgaccatccgacgttcagacattcagcattcaggggtaaaaaagaccatccagagctgttccccacttgggagctttggtctctctttgttggttggagagctaaagacgggatgtatgggttcacttgtacgagtcggagtatggaggacaacatacatacagtttaagcaggttgtggaatacaacgtgggcctttagtctccacttggatattccactaaagatatacatctagacagttgatgtgttgtgttggatgtatcggatattacggagtcaacgtgtttgtctggtttgcactcgtcgattattccccagttcggtccaaccgctgctgaaactggacattgtccggagcatcgcaccaaagctaacccgtctgtctctaggccaaaagtatcggctcatctctgctggaaaagccgagaacgaacacctaatcaaactaaccgccaaactacggattagtgcgccaactaataaccataacctagcatctgcaatacgagctaggtcaaattctgaaacatgcaatttgggatatcagcccaaccacgtgacatcctgcatgttgtgacgggtggggccaccgctggacaataatgaccttcgttgaggcagttcatcaaagtctttgtatattgtatatacggagtgatacagttggaactgtgttgttccctcactgcagcatatatacagagtactccctcctcctaccctcaaaactcgcattcccctcgagaaataacggagtggagcaaaagtggggtggatttccattgcgtgcaggaactttctttttgagaagaacggtaaaaggacgcgacggagtaaagggggagtcgaattaaaattcccttcgatgctggaactgcgaactacctctgctcttatctgattgttgttcgtgagggaagccagctcaaaccaagtcgaggcgtcgcatttaatatttactgatatcaccaggagcaacaagctctaaatccgagcgtctttccactcttatcaatataccgaacctattctcatatcttatcactattgcaatatccacagcccacctctaaggctccaaccccaactttaagccgcatccacggagaaagtcctgaacggaagcacaaagcacggcttggaaggacacaccagctgtctatccaagctcttgaacctaggaccattaggaccagccacattcttggcctcaccgaagagcgtaggctcattaggcggctggtcgtcaccccatctcccattgaactccaaccacgccacgggatctttagagtccaccgcctggaacgcagctgttgttccatcataggtataagtgtatacattgagcatgggatcccacagcacgccgcggtccgtatagtccaacagaaaccctgcaggcaggttgaagcccgggaaggtgtggtcgtgttttctgtgtgtatcagtcttgccatccgccagactacagaaacttatctagacttaccctggaattgcatagtttgcatgcgtaccgactgcagagtacacatacggccgcttgtccttcttttcaacggcggcgtagctgaacgcctggccgctagcatgctgactgtaccatattgcgtcgggtgtgccgttgacgaagcggatcatgttatgttccctttattgtcagctagaacgactctacccaggcaattcttcacactaaccagtctccgatgtggtcgccaaattccaggcctaggactttgccgcctttgttgaatctggatcgatcagtataaatgtagacttaacttaggtacagtcgagcttacgcatagaagtagaagtagaacgcatcaacggttccgttgccacggtctgcgatgataaggacactcgatgtaccatcaactgttcgtccctgggcgtccggtctgatccctcggaaccaggctggctctgggttggcttcgatgccctctagagatgttaggtagacgctcgtattacccatcgaattgagcgtgtcgaggttgttaagggtcaagggtgattccactccctcgatggccctccagttgacattgggtctggtgtgatcgagctgctgttggatatcgctcggcatgtatgtttcctggctatggagccagatcaagggtgctgtagggcagaataagtaaactcagatcatcatcaataccatgtatcgcatggtttgtttaccatattctaagacatatggcgggacatcagtagccctgtcgccgagggatgcccaggccggtttggttgaagatagaccgactaccgccaacgatatgaaaagacgcatcttgtgtggcttgtcctcgagtactggagagcgacaagcgcccttttaatctctatgaggacaatcataccttgcacttacagcgatgtttaacccaaatgtttatcggcatgacctcgtcatgggcatgggattcgaggatatactacggggcgagaagcagatacgaaattcgaagtaatagaatttcataatcacaaggtcttctgctattccagcgatgctattgattcctcgaagtgtatgcgtctccttgacggggatcatgccagtgttccgagcagcggatcggagtttcaatctcagacacaagaaagtgaggccgtggacaatcccaaggtgtactcaggtggtatctctcctgcaatagggtgtgattgttgaaaagttctttgtttacctcctttatcctccggcataaagtatgcaatatgcaaccctcaggaatgtgagccttatatcaggtgcctcgtgggtgcagtacaagagtcacaatatatcttttagtgcccaggtggtcataataatagtgcgatctgcatcagatcccatggctgaatatcattgctctaaattaatgatgtcacctgcccatgaagctatcacgacgaatgttcgggcttgtatcgaatcaggttgagttacttgtaattatatgcatctgtataaaatggtgagtcccaccaataaaatcgcctacctgtaccagccgttgtacctatcttttgttttactcttcataatatcagttaccgtattcagcattccccatcgaaaccatgtatactaccaacatgtcggccacgatgagatctagtcgctcttcattatcacatgttgatcccatgaccaaaattaatagtacatactatatattgagctggactttcctctatatataattttcatttgtgcatttgtactttcttaaccgaattcatgaatccagcctctcctgcttcaactagtccttcctcagcctaaaaaccctcaaatccaacggaatccgatccccaagccaagtggcacgttgggtgtgatttcgctcatcttccgacgccacagtattagggtgaacgagagcactaagcggaccccggttaataaccagccaaggaacgaaggctccaaactgcgcaggtgtgaacagattcacttcgaacattgccaccggatgcgggccaatcggccggtcgaagaatctataaatgcgaagttcggggactgtttacgaagcataagcaagagatcaattgagatgagcaacccgaccccgaccccgcggtagacggccagacctgcagttccgttcctgggctggaagagtgcgctgcttacattctcgtctaattcgttcccagagcgctttggcgaatgcggcttggtcggggctgttctggtcgatgcgtcagtttcattgtcgcttggctttggggcccggcggcggcacctgcacttacttggaaatgatagatgtggacgtcgaagccaccttcccggcctttggagagagggtcggggaattccgagtaggctttgcttaatatgccatgttggggatttttcattgacttgccgtcttcggcgcgctcgctgcggtagatgataagtgtcttggattagatgtggttgcgggacacttactcggatagcggctcgaggttttcgtaccccgccaatggagatgggtatgagaaagcgaatgcgtctgtcattgtgagtagattgggattattgaagaagatgagaggagagcagtgggtatgtaaagatattggtgtaagtctccgtgcaggtagttatatggcgtattgacttgagttgatcagcggttgcaaatcaatgcaaagatgtctagtaagcattcaatcttagatcaaaaatgtcgtcagttagacttggagtatcatcatctgtcaagtctgcgggtgactttccgcactctgacaaagccgcggaacggacctcggtggtcaggatggtcgaggtcaactacgatgtacatcgatgtacgatgaataataaatgaaatacaattttaagtgagtatacaagatagcaagtactaactattggttttctgtcaaacagagtgcttgtttagaaacaatattggcttaatcaatacacttgggagattttacgccgttctctccacaaatatatttcagggctatgattatagaaacaacgacttattgaaagaatgtgatattgaaaatgtagctatttcgtatagcatagacaagactgcacaaaatatgaatgaaatccagactaaaaaatgaaagttacaatatacaccttggtatcacccatagcacaatcctcaaacgccgatcatcaaaacatccagtaagaaagactaccaagcagcccgaatgtcaatatggccatcgccatccacgaatttgccgcgatcccattcccgtccttcacctttcttcgaccactgtacatcctctggtttgctttctccgtccacacccgcaaaagcagtgttgttcttccatttatcaatgacggcctcgtcgattcctgctgtacgtagcctctcctcgcccttactcctccagcgctcacgatcgcgcaacgcctccattgccatgtcccagtcgtcatcttttgtcataagccccgcgacaggacgacgagatgattcctggcccatggagtctaatctgttttcatctagatgcacatcggtagccgggtcgtagccgggtgcaaagtgagcatcgatattgctcatactgtgtttatagacacctcgcccgcgcgagcggataggtggctcgttttgtcgaggagggagtggtcccacaaggtcttctaggggatcggattcgttgcccaactcattttggcgtgcagttaaagtagccaacggcgacaacggcgacagccgtctatgccgcgtgctgggttcaaggcgagaacggcgggagccatgtggcgatgcatcttcccgctttggtcgtcgagatttgtacgactctggtgagcgggaacgggaaatggaccgagcagaatgtccagattgacgtttttgtcttcgatggcgatgacggtcggtacttcggtccctgcgcggagaacgacttggagacctcgagtatgaccgctcacgtcgccgcctggtgtgttccttatctccgtcccgttgatctctcatagattcgtgatccctgtggtcacgccgatgtctatcgcgggatttgtctttctctccactcccatcatactcttcgtttgcccgtcgatgcctccgcgaccggtctcgttccgccgatggggagcgacttcgagttcttttccgatgtgaccgattgcgatcttcccgatctcccctccggtggtctcttgatcctcgaactttacttcgatcatcagatcggtctgtcgaagtggggaccaaggcacctgaagcacccgatgcctgatatttcagctggcgcatacgctgtcgtgcttctctttcttctttgagcttgagagctgtgttatgactgtctgttactttgatgagatttcgtaggaagcgggtattgggttttggggcattgcttgtcggcctgcaggtgcttgtcagtttcataatcatgcaaaccgcagattatgagagaaaccaaccttgaaggcataaaagcgctcattccttgagacgcatacttgatagaactctccttagcctccttggccaggatctgcgcaacatactcgtcgtccatgatccagatgagccacagatcgtaggactctgagggtgtaaaggagtgcaccgaggaaagtgaggaattcaaagaagagcaagtatatatgctaggccatattaaaattgaacaaagaccgaatcctctttagttgaaagaaaaccaaacgaggcgaagactcaaggcgaaagcgccttcctaaagtcgtctgaccgcctttgataaggctgtttactgtcccgcaaatgttatgcccgcagtggactcggcccctctaagctctctacattcgcaaatctcgtcggcttctcttgtcagaggcagattttcgatgataaagccctacaatatgacaaactcatcaactgaagcgcttgcagcccttcagcagctggaggagaatggcaatttgaaggaccgactcgcgattattcgcatcagcgagccaatttccaccgaagttggggggtcttacccatctccttcaaaaagaacctctgatgtttccgtgtcaaatttcgacgatcctactcctgcctcattggaggctgatcttgcacattacaaggtccgcgatgagcccgaatgcccgctatccagaccagcaaatactgatgttcgcataggaactattctccaaactgcgattctcctatctcgagcaagtaacgaaagaaaaattcttgcgcgccattgttggcgacccgcctatggttgtcggacacaatgagaacatggaactggagacgcaactagcggacgtgaaagcccagctcaaggcccaaaaagaagacgcacggattatgattgaggaaatggagctgatgggccgtgatttggcaagccgtgagtagtcaatcaccgtggaatttcaacatgttgactgaagcgtccgcggctatgacaggttacaaaaatgtcgaacttcaaactacgcagctctcaaccctgcctgcttcaatcgagaatctcgagtccaccatcgccgagctgcgtgcaaagcagatagccaccatggatccttccgatacgaatacttcctcctcgcagaaccttcctcttcccgcgaccttggcactgttagcagaacgcgaagcggaactggcagcattgaaccgccagctagccgctgtacataacacattgcctcggaagactcgagaggccgaggctgtagagagagagtgcagcgtgctcgagcgacggaagtcagatgcgatcgcgcaagcccgtgaagcccaacgcaagaagcaacagggcgaaagtgatggactcgaagagatgggacgttggtacaggggggcagaagagaccttgaaagaattggtagggacccaggcatgataacctgcaggccaagcctaggcttgtgtacgatgacatgagggacgaacgattgaacttatattaggtggggactggcgtttaagatctactatgcatatatgggtccgtggatattataattccaggttaagaaagtatggtaatggtatcattaaatcgggttccaaattgaagccttgcggctgttttagattcattgtattgcatgatcgtagaacatgagacgctatgcagtcattttgaacctccatggtatgaaggcgccccaagcgaaacccgaccgtactccattttttggggaatattgggaataatttattcctcctcctcctcctcggcgtcctcaccaccagcggcagcggcggccttcttgcggcgaacacggccgggacggccaccaccgaagggcgaggtgagggagaagtcgatgtgcttctgggagtcgagacggaccatgaacgagggaacgttgacgatctgcttgccgacgcggatgtgacgctgcttgatcaggacacgggcgtggtggatggacttggcgaggccgagcttgtagacgcaggtctggagacggcgctcgaggaaatcgtcggccttgagagccaggacgtaatcgagcttcatgcgggcctcatcgagcacaccgatgcggacaagacggcgaatgagggcattgccttcgaagagacgcttggggtccttctcgtcgagagtaaggagctcactgtggggaagatgaaaaattagcgctatgtccaccaaattcgatttgcctaggcccgatcgctcgaaacctcgcaaaatcgcagattgttccttgcacataccgagcagcacgacggatcttggagagggtgagctggacacgccacacctcgcgcttgttgcgcaggccgtactcgccgacagtcttgagttcagcatcactagtaaaaaatgttaggaatatgaacacgacataaccagaagcacgcttctggttagtggccggagagtactaacagacgagccgactcgaaggctatgatggagttagcatttagatattcaaatcgatcatgttgctgggacttcacttacgacgacgggggaccttgtaggtcttggaggaaacgcgactgcacagaaatcgattagaacggtgtgatgccttcaatttcgttgatatactcacggggccatggctgcggttagatgggcggaggttgtcgacaggaggtcgaaggatcaaatgaattgagaatttgagtgtgtgtgatgcgagccctaccctagtcctaattgggaaatataattatgtcagctgattatgtcattgagcctctccaggtccatgcccaggtccaccttctcttttcagcaacattcggaatagccggcccttcaatcgcctgaaatggatgcttgtatgcattctttttttggatatatttgtctggattacttggttttactattacagctatttgtcttaaagaacgtcaaattcgggacattttatgcatcgctgtgactcgggatctttcttgatgttgcaggcagatcgaaaactggcattatgctttcttgcgccatagcaagtaggcgaaggcgatatgagcccaaaatacttgggttgttgatattcatggcagtgagtcgctagagtctgaattctggaactggctgctggctgctggcttctagatagctgacatcgtgattccggtgcgtgaggatgatattgttgttgccattacagttcactacactgcatccccaattgaggcgtccaggatataagtgtattatattggaagatccccttgagacctgccaagcaaaatcgatggtgtagtcaagaacaccaatagtatctcccccaaacgttaccacctgcgcgctttgtttttgtctggtgagtcagtcactatacaagatactatatgactgaacgagataaattcagaaaggaattaaaaaaatccggcagtttctgaagcattggcatgaggagaagaaaagcattgcatgtttagtatttacaaatctcgaagtcaagaggaaaactcaggctttgattggccggaggctgattattgcgctaacccaaattcagaaaaatatttaataatccaaaagtggcgtagcgtggatttagcgagagtagacatgattatgtcatgtcaatcccacaaattgttatccgacactctagtttttcgtgttgaaggccccgtcgacagttaaccaccagcaccaaccacaacaccgccgtcatgcctcactcgtacggtctgcgcgccggcactcgggtacgttctgattctatttgcgacacgcgtctttttcatactgggaggacgacctggatcaactggatatgcctgagggaggataagtgctaacgaaacgacgaacagtatgccttcgcccgtggcttcaaggaggccggtatgatccgtctctctacctacctgaagacctaccggtatgctcaaaaccctcgaatatcgaattcacgacaagaatggaaatctgacggatatttttagtgttggtgatattgtcgacctcaaggtcaacggtgccgtccagaaggggtcagtacaattccaaaattccttcctgcgctctcgcccgaccgtccaatgcgatcatccaccatgagcagcgcgaaacccggaaaagaggacgagaatctaacagttgaacagtatgccccacaaggtctaccacggtaagaccggtgtcgtctacaacgtcaccaagtccgccgtcggtgtcatcctctacaagaaggtcgacaaccgctacctcgagaagcgtatcagcgtccgcattgagcacgtccagcactcccgctcccgcgaggacttcatcaagcgtgtcaaggagaacgccatcaagaagcgcgaggccaaggagaagggtgtccacgtccacttgaagcgtcaggccgttggcccccgtgaggcccacttcgtcaagcaggctgacaacaagcccgagaccgtcgtccccattgcctacgatacccacatttaaagggctcgctatcgaattgggacggtgtgtgcggttgttaggtgtttactgggttttcactccatttttgcctagactgaaatggactttgatacatgagacgaagcgcaaagggtttcggatgccctggcacatctctcgcctgtgcatagattcccctgaatgaaacaaaatcaaaaaatttccgagttcatgtctacatctttcccggtccagcataacttatatttggtgtattgttctaggcctgtgctgtagtgctattcgttctcgctctcggccttgatcgtcagccccatctgagatcagtgtactcagatcaagtatggttcgaactttgagtcataaattataatcgcttactagatctaaatgttattgcgatgatcattgatactatgctgtggcgcgggtggctttacgagtgtggcagagcgaaagggatgatcatgacatagatgcactgccaccgcgacacaagctctctcaagctactccgtatagcttcaaccaacatccgaatccgcacaagttgggcattgtcgccctctaggccacccaggtgccatacctaggctaatgaatgacctgaaccgactcacccatttaccccgattctcctgctttcgtcgaacgcccaatccccctaccttggcatcatataggtgaagtacccgatctcaagcaccagctaccggccgacatttcgcaagtcaaccgtattccgcagaccgcctctttcagctgtggttggctactctatcctgttctagacgattgactatcgcttgcccctacccaagggagaagctccacattcgatttgaatttgtccatgttgctcactctaaacttcaggcaagcacttttacccggtagcgcgggctacggatgaatgaatttcttgttgatgggctaagtttatgttgcattgtgagcgaacacctgaagcgagtgaaccgaattcctctagcactttatgtacccgattgtattaatcttgtggtatgtctaacacggaaaggttctagaagtttatctgttcgatatgttgtcgaatacacgaatacccctttgtgtttcagaccgaccatgcagtggaggtttcaagagttcatgttcgcatgtgaccgtaagtagagagcatgagggtataagcttattattacattcaatcggtctagattgatctttgtggtttggctaaaatatggttcctacgtaatggcttagatcgaagcatcttggataatgagggtctaaagttgggtacacagccacatgcaaagtccatagatcacgacacatgacgacattcggcgataactggatgtacgaaggtggagattcaggaacaatgaatacatgtaccttctgtcgattatcaagggcggtatgattgctggacagatgacctttgtctgatgcatgtcccttccctgtacggcatgcgatgaccagccactcccccgggttttacgcctcaggtcatttagaccaaaatcggagtttctgctgtgagtaggcccggatgccagactgaacaggctactagctgtcaagctcctatttaaatttagcgccggtcagcactataactactgagtttctgaaaaaaattgttaaatgcgcctgggttaaaaagctctgggtatacaaaacctggcaactcaatggatctccagccttccccaacaacaccgctgccactctgctcacccgggctatcttcgtgggcaatgagatagtcaaggcatgaactcatttggcttataactcctgcttccccccttcctagaagtcatcaatccgcactcttcagaatcatagctcgtaccttggctatttctgcaggaatctgcaccgctctcttgcaataccgttgagtagcttttctagctacgaagaaatccattttattccctcctctgtcaaaggccgtgttcgccaccgctttcgactaatttccgtggagatgggctctaataataagtaagccggctagtttgcccaggtgataatatatatgaactcccctgcgatacacccaattcaattcagttgtcattggtgatatctcactaagaatctgtctgacttttcgatttatctgttccatccgctaaccttgaccttctctcagagtctcgtcatccgacctccccgcgactaaagaccccggtaccactagcaaagacacaacatccttcggtcaagataacacctcgaagaagtctgcatccgcctccaatggcaagtcgaaaaaggggacctcatacatgctagagtcgtgggagaaggcaaccccctcgtcggagccgtggtcatcaaccaaagccacctactcgccaaagcgctaggctttggccactgttgttcattgaaattggagcttggagattgtaccagatcattgtgtaaaggattccgggggacatcggggcttggttcatctttttggtttggggtgctatttattggaaaggaaagacttgggagttatctagtcatttaactacggagtacggagtgaattaaatgagataatgatcgtcctagtgcatatcaatctaccaagtacatatgtagttacaacactgtggacgaacggcttgcatggagtggggctctggagctgtcttgctgatcatcacttgatgaatctttttttggcccttctctttggtgtcgttgtctgttttcctcttgcgggtacatatatatacttggatttgcattccttttatttccatttcacttcctcgatctagacaaggcaattgtagtcgggtactattgtgttacattgaagaatgagattcctttacatccatccacgatatctcaaccaaagcaagttgcagtgtcgttcaatcttgcattgaaactttggatgagccatggtagagatgctgtacaaccccacttggatccaaatccagtaactctaccgccgggagtacagctcgcatcactgcgaacccttttcttttttttctctccctctccacccggatttatgcatgattatttttatctaaagaataagtatcaatatccatccctcccaggcttttgaataagccgacaaccaccgatatgaagatcaatgtctgaatggggatgggggataggcgagtatcaccacaatcgcccaacttttgaaaagtatactcgtgcattattgttggccggggataagactgtttggtccaaaatgggcagcggttgagcttgccgttctagactcatcttaatcagtcaaagcgcttacatccgagtcgtctggaaaggaaattattgatttatcccgcagcagtagtgctgatgctgatcctgggattaataggccttttctcccaaccaccctggcagagctgcgcgtaaatgatgaaaaacagccatccaattcgctatatcctgccttcccaatccccgtattatgcaccttccccgctcttgccaatcaaatgtgagcattgtacggagtaatatactccgcacaagacagaagcaatgcacaacgcacggacttgaccattgaggagagctctcccatttcaacattcgctcagctggcagccgcatgaggtttctcaacacgatcgacgttagttttccgcctggcactcccgacaatggtcaagtccgtgtgctgttggatccatactgcattgcttctatcttgtgcggagtatgtatgtccggagtatggccagatactttggattcggccgatgattgccgtgtgttcgtattaatttctcgaatattattttcggccatcctattgcatttcctgcctgctccgtccaagcttctcggagatcgaatcgatacatccggagacattaaccgtttggaaataaccattccaacctttttttttcaactccaagtacccgatggcggtgggtttatacccaactggtcagctatatcgggtgagatgtgactgcatgattattactactccttacaacagttctaccgcataggtttctacatgttttcacacctaagaactggtgtagtgagggttttaagcatgtacaatagattgattgatctatacgatcttcttttcttcctcagcccccaaacctccttcgaatgtccgaactacaccacaggaaggatccaatgagttagaacggcctaagcgcccgcgattctaaagagcctttggactgcatgaaacctatcattcgttgccctagttttgtttgttgcatcccgaggggaggcactgcctcactgcttgtaatccactttgaccggtaaatcccctgctcggttgtcgactctcttattccaaaatgtctctttgccaatttggcgttgggctttgattgttcttttctttccaatctcgttctacataattatttaattggtactggctctggcactggcactggcacccgggtgcgagcgggcgtagagtagccacttctacgtacttaaggtcttcttttctcgtctcttacccttctcgtctccccttcgcgtctccccttcgcgtctccccttctcgtctccccttctcgtcgatgagacctactcttttgactaagcttcaaacaccattttctctgcttaatattattcgccttcccaaagaggtctatctatccgctatggactccactctcaataatgaggaggacgatgagatgatacattgtcctggaccttctggctcctttgcctcttcggaggagtttactggtatagataatgatatagtgagttttcatccagagatcctagcttcagggtcctaatgcttgactagtattatggatattgtgcttcaggagcctactcttctgctgatgtgacgagcttcccgaatacggatgccttccaggactctggatggatcaacaccaagcctattagtcaaattccagaacccccacagcaatacgaaaatgatctggcgtacatcaacccgggatatcccctgggggatgacaatatcccccaaagcctagaaggtgatctaggaatttcaattatcactcaacgaccagctcatccctcgggaaatcttgatcggaccacgattggaataccaaatcccacgcccttctctctgcaaccttcatctgaaccacctgccggcgtcatggaacaggttaacagcacctggagagctctcagatccaaccagcaatgtagttctgatcaagtctctcaaagcatgcagaacctcgaaacgatcaaaaccttctttcagtcaaagctcccggaacctcctgctgcatcaaccgagtactcgtcggaacaagaaaaagaaatgtatcgatgttgggtatgcgatcctcagacagctagagcaacctttccaacttttggtaccctgaagagacatttggctcagcatagtatatgcgattgcgagtggtcctgtaccgagtgccccaaagtcctccagcggcgggatagaatgcgtgatcatcttatgcacatacacaaaaaatccgatctgctcccggctgaagtggaggcaactggaatgagacgtccatacccaactcactgccccctttgcccggttgagacatcttcttggcttgtctattttgatcacgtcaagcgtcactgtcttatttcccctggttcaaagaagtcctctaccaacggcggtcgatctcgtcgcggcaacaatggtggcgggaatggcgggaacgctaatggcaatggccatagccagagcttttcttcagccgggccaagcaattcaaacggaggctcgcagtctaaacaatcaaatattaggactgggggaatccattcgcactctgtttctgataatcggctcaacagcagccattgtcaaagcgtcattgatgccattgaacaaattcctaagggatcatctcgcgagtccagggctcacctccctggagaagacagtgcgatgcccaataacccccaaccctcacaaactcccgggttgccacgaaccgatcattcgaccaagcgcaagcgcccggacgaaaatgaagagaatctccttgattcagagaaatgcagatggtgcgatcatcacatggcaaaatgtcgacaatgccaacctgacctttgccacaagtgtggtgacctgccccggagtgctattcaaattggggcttcctcgacaacgcctgtgcaagacctcccagatacatcttctaccatcatccacttggacgaaccttactttaacgctggagcattggcaaactctgggctacctcagactatgcccacccaactgtttgacatacagttcttggacccacgatcattggacatgaccaacaccttcacgaacgatctttcccaaaacaatccgtttatcggggttgtaatggattcagaaagtcatccacctctgagtgatctcagcaacaaggtccaaaagtcgcctatttttgaaagcgataccacgttacttagcagcattggacttggcacattgattgacccgttcttcgtcagaagacagaccaagcaaccaaaagcgaaagcatccggaggtcagaatctaggcttatacaaagatcttgttctcaaaaacactccttcgcccattctggaacctcttcaactggtgtctcgttgcaaatgcgcatgtgtgaccccaactgtcgactacgaagcccacgaaagcctcaaattatcgtcgaacaagcgcatcgagatgacactaacaatgtctcgtgcgcaaaaatcgggtcatcgtctccacactcgagtgcgactcttcgtgaggctctttactatccacgcatctgcagcagcaaagtcagacacccagaagcagaggactcactctattgcacccgaaattaccgacgaggatgctgagtctgataccgattcagagcaagagctcactccctcgtcgccgtccggatccgagctcactctacgcctctaccagaccgaggacatgcaaaactggtcattcagctttgacgtcaagtgggccttgacgaaactcgcccagtggaccagcggcatagatgccgatacgtaccagaagctcctactatctgatccccgctatatactggacttgatatcgaaggatattatgtataagattttttgcttgttgatgggtcacaatgggctccttctgttctatacctcattcatacgcacgtcctgatggtcatatgctctacgattttttctggtttgccaaatatcttccatactcctcctgtctttcttttctattaattctccgcgctagatatccagatcctcctgtgcaagtctgcattcaacttccaggagatgcataatgtcctcatgtgtttaatagggggggcatactacttacatgacttttcatgaatcacgagattggacttgaaatgaaatatgattcatgcgctgtaaaagcccttctcagtctcggttttagacatctccaactataccccttttcaagaagcggtctgcgccttatcgaatgtagcgttaattaccagctttacttgcactgccaccgtcaaccgtctatacaatattgtgccgtctgccttgggtaatgcatgaaaaggacaagctccctatatgagctagggtgtaccttgcttctttttgataggagatgttttgatcgcgtgtttgatgcaggggtattgcattgcatagcagcgcatgtagcttgagcacaggtgcactagctattgcggacatgtgaaaggtcttgtatatcgaccgcgtctcaagtgacggctgagtaacgtgaaagtgacgtaagagtattacatctcactctgcgcgtactgtccgagttatgtaattatatggatgtacgagtacacgctgtctagaagacgtacatgtggaaaatggaataaaaaaaaagatatcctttgctaatacgccgttgaattaaagggaggaaagcgaatgccaaacagatccaggactagtaagatgatcctgtgagaccatcttcagtagttcggcgtttcttccattcccttctcccgatttcatcattccagctggacattaaaaagcaaccatgaaaaaatttgaaaaatcaatccctcactctgaagaaacctcaccacgcgcaaagaccatcgggtctgtagcaacagactctagggacaccacgaggccaaatgacgtgtggttcccgagcaacatgacgttgggattcttagtcttggcggctacgcttcgcgccgtgggggttccaagaacctgcgtcggcgccaccagcctggttgttggggttagggttgtagtagccctgattgaatccggggttggggccctggaaaccttgttgtcctggagattgtcagtattgaggaacggaaagaacgatcagtgtgtatgccaaaatcacttaccttgcattggcatgttgcctcccatgccaccgggcatgccgccacccatcatgggattcataccagccatcgggttcatgcccatgccacccatggggggagtcataccaggcatacccatcatcggagcaccgcccatgtttccaccacgaccgccacgcataccagcaccgccgcgcatgccacccatcatgttgccgcgattgttaaatccgtagttctgcatgccccccatcggggcgccctggaagccacccatcatggggttgggcgcggcaccttggaatccacccatgggattgaagttgttgcggttattgaagttgttgttcatgttaccgcccatgccgcggttgccgaagccgcctcggccgccgcggaatccgccagtgtggttgttcatgccgtagttggggttgccattagggttgtggacagcaccaccgccgcgaccgccggcattgcgcatcggggtatccttggggagggtcttgaagggattctggtgagggctggtgtagtgaacggtgtacttgcgcttgggggtattttgtctctcaatgttgtgcttagttgcagtcgccgcctgagccgtggtgaactcaacaaatgcttgactgtgagaacgttagtatcaatgctcggcatcgtatttgttcacaaccaagtctgtgatgttcttaccccttgctcttgccgttcaccttgtgctcgctgaaggtcacatccttcagctggccctcaactccgacctgattcgaccagcttcggacttcgtcctcagttgtccaccaggtcaattcagaaatcagcaacgcagtggtggcatcgggatccacggattgatcatcgtattccttgcgcttgattccctgggggggagcaggcagaccgtggttgagtgcgggctgctgaggtgctggctgagctccattgttgttcgccgggttcacctgctgggtctgagcgggagcaggggtctcctgcttgacggcgttggatgatccggcgccggactcgggctggttctcgggagcatccagaacaagctcggaatcctgcttgaaatctccgggctcattggcattgtaagtgccgtcgccgtagatgtcaatgtcgaagttatcgtcgtcggtagccattgcgagctagattagtatccttcggggattggatctcgaagaaattattgaaattgcctgagtatctgaggttcgatagtacaggcccttcttcttcttgatcctttccgcttctgagcaaatcaagaaaagtgcatgtctgcaggcacaagccaccaattagcattgaaaaaacaccacgaaagaaagcgcaagtagtgcaggggtatcacgatcccgtattagcttccaacagcctgttggaagtcttcacaggtaaagcgactggaaatttggccaagcccccgaagggtaacataggaaggacagacatgaaaacaaagaggccagacaatacgtacaatccgaagcgaagcgcttccggtaggcacaagacttgcgcgagctgcagacgcggtgtacagagaatgggaatcagggttgttccacgactgttggatacaaagtaataagaggaaaaggagaagagaaggatgccacagacaggcaatgaatgtagtgacggacgggggaagagaacaggagccaaagcaaaggaaggggaagaaaactcttataggggggtataaacgcgggcgccgagaaagggatttggtcaatcacgacgtcgtgggctttctcaagttcaccaaagatcttagggccgacaatgagagctggggcgatggcgatgtaatcgcgcgcggacgacgggccagaccttgggagctggaacaactattctccattctccagtccccccggagaggccaattggtcattccggagaaaccacctgttcttcttttgtcgcgacttcattcttcttcaagttctttaatctttttcaataatccttctttttcgcaatcatgtctgagactttgcaggagcttgccgatatccctaaggacttcatccgggagggttctcaattcgttcgccgctgcaccaagcgtatgtcgatcggtcatttcgcgagctcctgacacgctgacatttccaatagccgataagcgtgaattcatcaagatcagccaggctgttggcatgggtttccttgttatggtatgtgccattgtggcaacccctggatcgcatcttaaggcggaagaactgacatcgccgatagggagccattggctactttgttaagctgagtgcgtgttagattgcggatatcagtctgcatattcattgcatgtttgttgtattaacctgcttgttacagttcacattcccgtcaaccaagtgctggtcggtggcgcttaagggagaggcactcccaggagatgttcagatccatttgataattttggggagatggaaacagttgataatgggaaaagcctgcagagagaagggaggaagagcgataagaggtggtatcaggcaaaatgcccttatgaatgacaccgctctatcaaatcgactgggcactatgacctaccacgtgggactccccaaacaaccctggactacgagctttttcacactgcaaggcattgtcccttttacgttttgaattcccgtggcgatcaccatcggccacttggcgctttttttttggcgagcgataggagacagagtatgatcgctatctatgagataccaccatttttcacatcctgtatcaataggggtccttgttttacttaatatacaccctcgaggcatttattcccatctacaatatcttatactaggcttttggacggcctgggtcatatctacagtcgtggaccagatgacatgacgtattgtattcgtcaaaagagatgtgtctactcctcctgagtagatattgtgagatatattgaacacgaacacccccagggtgtgcacgaaagccaactttgaatgcttttgaaccaaaaagacatccttcacctaccatatcgtatcttcagcttcctcatcagcccatcgacgaacaggtcgactgcgcaatggacgtcggggtcgagcgtttactgcattttcgtgaaatcggttaaactcagggatatatcgtagtctgtcatcataactcttgccaagcggtggatctccctcgtctttagtagcaccggcgttccaggaatgcacagtacaagtgccagtagacaagccccagccattccaagaagttgctgaacacagcattagcaatttctactaaaacgaacgttctgggatatagttacctgctagcattggcgcacttgggtgccagcttgcatcgcggacgcaagtcctccacagcatctccccactcatctcatacgctgtagcataggcatctggatcacgcggccgcgaattgagtgtcgcttgaccaacgtcaatggtgccggctagtgtggcatccaagttgtacacataaaccttgccatcctcactcccactgtaaacatagcgtgagtttgtgcttcccggtggcgagaagtggcagcggatcaaggttttgaggactcggtggccccgatatgtaacaacagaacagtcattcttggcatttctgcggaactggtctggatattgctcgaatcggtaatcgaagccagttgtgtagtcgacagggtcgatgttttcgatatcggcggtggtcatcatcttccgcagatcccaaagcttcatcgtttggtctttgctgtttgataagacgtatcggccgtcgcctttgctgtcaacgtacgttagaccctcggtatggcccataaaggcaccggcttcacgcccatcgcccattgaccgtcggtcccaaacccgaattgtcgtgtcgtctgatccagaatacaggatatgcggtgatgatgtgtcgccgtaacacacagcattgacatgatgttgatgtcgatctcggaggtttagaactggctgtcgtgtttccagatcataaacgatgaccgagtcttctgatgtgccagcgacaacctcacgtccatctccggagaatcgaagagaccagatctatcaaaaatgcactaggttagccattgaaatgacaattaaagcatcacttcacataccccgaagtgtgaactaccccaactccgtctacttcttcggcccggtggagcagaaaagtctaaaacagtaggatctgaatcatcctctgggtctgtgctggccatatatgcctgacttcgtatcgaactgtagacaaggaaacggttgtcggggcttaacgtcgcatctgtgatagtccactggccgaatggataatcgacggttttgtagtatttccagtcgtaggggttggatgtgtcgtacatccgaaccttgaagtcttgtgcgcagcagaaaaagaaattgccatcatccgagaattggcctgaataacttcgtgtgtcatagtgaatgatcatgtccgcaatcgaacttggaatgaggccctattaggcgtcaaacgtatgcgttagccccgcagactgttttatgatacatgtgccgactaagttggcctacctgagaaatagactggttggctcttttctggactccatcagtatcaatgcctagttctcgccacattaggcttgtcgcgagagatttcttgcgctgtctgaggcggtcgacataaaattgatcagttccgaaatgaccttcgctcatcaacttcttgccctccgggttaggaaccggtggcagtttaagagtttcggcggatcgtctggctcggaggcgatttcggaacatgggcaggaaatcgtcatcgcctacaaaatcatcttcttcatcttccatctggtcttgctcttcttccatagcgcttggccaaccattggcttggaggatatgttgtaagccactggatgcaagtaactcgaataatcgggaagccggtactgtaatttgtgagaaattgtactgataccctttgagaatttccagcacaacgtactacgagtgcgcccctcattcaggttgcctgtgtcctcgctctccgaatcgtccgctgtaagttcgatttggatgttttcgaggttgatgtggttatagcctatcacagggaagcggttagtccatttgtatagtattttgaggacatatatttcagtcctaccacttgccccctccgatctcatttgctgatcattgagtgtgtcgtcctcccatgcgccatcgtcctgggatggctctagcgcggggtggtagtcgggatccagctcgtcgtcttccagccattcgtgggcaggatgccagatcccttctgggccccttggagattctctcccattatcaggtgtccttgaactcatagttgtgtgtatgcggtagtgatagatgaggagatatggtgcttatcgatacatagatgataagtcccgacctcggtcacgggcgctggctttgggttatgtcattcaccctaactccgaggctaaacgccgatgacggcttgcacttcctttgtatctcaggacttataccttctagattggtatataaatttgcctcttggtttcatgcactccagtctgtggcttgtttcgagcaagcatagtactcaatttgacctttaaaaaccaaaatgggcatattatatgcaaagaagcagaagcccatggtgactgcatctctagctttgcatatgcgtgttatacagtaatcatatgtcaacgaaagcaccatcccaaaccccttataataatactgaaggagtttagacctctccattacaagatattgaagctccctctcgatatctgaatacaaaagaaacaaatactcaaggactggcacgtaacattttgtacatcttctctataaagctacagccgtatcatcaagcaatttaaagtagtcctctaagcaagcatataagggaataacttaaggataatgctagcaatatttaccttgattatgacactagcaaggatatccatgtcagttatcctaaaaacctcatgcgcttccaactcacttccaacttacttgtcgcttctaattcactcaaattcgcttctgaagcttgtttacttccaaaccgtagtagagaactgggttgccactcaagatgtgtcatcttagcgtcgaaaagaaggcaataaatgaagtagtctgatgttaaaaaagtatgatttacatatccctttgagcagttgcctgtgctctttcctactccctactatactacaccaccctatcacagacagtcgttttcgcccttctatccccgtccccatctcagccatccctgtagggaacatatacaccaaccatatcaaccactaatgtggatggcaagaaaagaccagcccttgaggaggattcagaaaaattcaatgactaatccgaatcccaagtggacaagaaatggtaggtccatcttgcatctcccttagtgaagattcaactaatccgcctatactatagagtcctactcagattgaataccacagtaccttcgagaataaagagaacaccctcgacgcctgtgtgggaaaaatagtcagcgaggcgccatctctatgctatgatactgagcagaaagaagcgttgcgtggatatcagaagcattgcactggcataatttcttttttggatgtcttcttattaagtttaagtatacgaagaagttaggttgaaggctacagattaatagcatgaaacagcttcatagtaacagactaggtgacctctaaataggtattctgattgagaatcgcggccagcagtggacatatggagtgtgtcgctgtgtaaatagtgtgtccgtagtccttgtttttgatgattgcattgaaggcaagtaatcctttacgcccaagacttcaacacgatgttaatttcagctcccctcgacgccaatagatcagacaaattaattcaaatccagcgcccatatactcccgaaccccgtgctggatggaggactagcagctgtgttctcggtcattgacggacatcaaatacagatagcaacctaggtctatattcataggctataactatgagcgattctcagccgcccgatgccgaaagaaaagaactcttcacgcaatgccactgcggtggagtctctttcgccattgccccacccagcgagaaattcgtcgtaagcccctaagtacgagaaagtggcttgcgagtatggatatctgcgaccgtcgattggttgctggcacacgcgtcatcagctgtcatccgttgagaatattaaacaaaaaaatcagaataagcgcggcctgacatccgatgtatgtatacatgtggctgtcaagaagataagctaaaagggcggatcaattatttccccggtctccattgatagagatgcttctccaactcccgaggctcgggttccctaggatctactctgtggtgttcaggtccaaggaactaaagtgagacaagctgtctaattgaatagtccgcactcgattcctcatccaagcattctcaatataaaagcccgctcgccttccctcaaattttccctccgcacccccccaaccccaccacgatgcagtccgtcccagaatcgcgacagcagtcgttcgaggagatctacggacctcccgagaacttcctcgagatagaagtgagttacttagcgcctaatacccaatatccactcccgaatcaatcacctaccccaataccccagagtctcgtgcccatatcttcccctaatcaagcccccatacatccccacccaaaacccgcatcaacaacccccatcgggcaccaagaacgaaaaatccagactaacaacgactgcaacaggtccgcaacccccagacccatggcacatcccgcaacatgtacacgtcgtacgagattgtgtgccggaccaacatccccgccttcaaattgaaacactccgtcgtgcgccgccgttactctgatttcgagtatttccgcgatatcctcgagcgcgaaagcacgcgtgtcacgatacccccactgccagggaaggttttcaccaaccggttcagcgacgacgtcatcgagcatcgccgcgaaggtctgcagcgcttcctccagatcgtcgccggacaccctcttctgcagacggggagtaaggtgcttgctagctacatacaaggtgggtttattctagtcacttgtgcggattgttgaacgtctgctaatctcatcttgcagatcccaactgggaccgcaatgcgtggtagatgactattgcgaccattaattcattaacgagaagcatgcctcattccctaggatgggataggccttccatttagcctcctcggactccctttttcacctttatttccagctccttcccttctccttcttctcccaatcctcacttcgcactttgatatcctgtccgcggctgacacctttcgtgattgaaaatgggtaccccgcagtgtatgctatgtgatgatcattgcttgattttttatgctcgtttgatatccgaatccaccgcttctttctccccactcagatacagatacaagcaagtacaggttttatttggcttaattggacaggcgctttttcctgatttttctttttccggcaatttaccaatattgttccatatgctctcatctttcgcgatgctatctttatgcatagtgagaataccagatttgttgcatcttttgctcctcagtgtcactttgattgtcaataaattcaaatttgaaaagagaacttttactaaatagggactgtagcaaaaacaaccgtgtacatactgtgggatatagatcaacaatgaaaacagatgaggaaaaaacaagaggcgatacagtaatgctccgcagagtacccaaagcaaatcaaaatgaaatgagaaagagaagcaaaaaagccaaaattcaaatgttcataacatgcgttggcaacatagcccatccaaggcttgtcccgattaggtcaattcatcccaaatcataggagcgagggtattatcttcccacggcgtctccaccgtggaagcagcacccgccccaggtccatcatccaaagagaaagaaagcgcaccggcagcagcaggcggaagatacatcgagtgctccgaaaagctctgcggaggcggaggcaagagcgcgggatcaatctggccaagactggactgcgaaggggtagcagcgtgacgactcctcgacgccgagttgcgagaagcggtagtcgaattcggagttggagttggcgtcatggcataggccttgcttggagattgttcggtgttgacaggatgtgggcggggggtcgacgcgcctgcagccgaatcctggccctggccctggtttgggttggtaaaggcctttccattcacagagccaccatcacgataggcgtgtgggaacttggttctaaagcggtcgcggaggtctgttgctttgcggtggcttaggttcaatcgggaatcttgctggattagagtccattggaagccgtgtacggcgtagcctttgaggagggcttcgtcttcgacggctgtgaagggtcgccgagagcgacgtttagattttacgacatttgcgggaattccaagagatgcgagggttgtctgggacttgctcgcgggagcgggtgtgctatttcccgatgagggcgactgcgattgggggatgctactactcccgggatctgtgtcgggcgtggatgagacggtactcgaagtagagggtttttgtggattgggagcctggccttctgctccagagattgactcggagccttgactcgagggcattatatgggagaggtggggtttgccgggtgtttcgtcagagccctctcctttggctttgagtagggtgttagcgagagtgtcatgtagttgtttcgcagcttcattgggatcggatgtactggagtaatattagctatcctagttgacttcagaggattgaattctaattgcttaccggtacgcccatggacataatactcggaatcttcatgacgaaactttagcataataccatacagttggccaataacaagcatacctgtcttttaaatttgaggcagttcgctgattaaactccagctccggttgagcaaggatagcagtccagttgccaatcccacatttgaccacaccccgaagtaaagtagccgtttcttcttcggtccactttctcacgtttttacgggaccggccacgagttttgggagaaattggcacatcctgtccagagtgaagtggcaatgccttagtgttcttgggatcctctgctttgcgaacagccagggcaatctcatcaggatccatggggttagtactttcaacattttcatcattatcattagggtcgtcgtcttcatccacattgagagacattctgaggatatcctcgagtctagtatctcgtctttcagcagcagactgtccatctgagatcgcgacatgagcagcaactagcgtcccagggtcaacagcagcaccgcctctggagggcttagtcaaaagctgggagatattagacccagcctcaataggtggaagcaaggcggcattaggtggaggctcattcaatccattcaggatagcaaatggcccaaatggaggaggtcgctgctccttctgggcctgggggataggtaactgtagatgctcgctgaacgaatcagcctgggggtctcggcgtcgacgcttgcgaggcccttggagggcgtcgtcatcgaaggatgacgagaatggaaacttttccagggcacgaagattcacaaaagcgggaaggattggccttgggggacgttccacattcgactgcgagtctgctgacagttcggttttcctgatgcgcgcagcgttcagaaactccgtaacggtcggcaggcctgcttttgcatttgctgggatcttcccgctattgctgtttgaattggggatattattcggctcccgtgtcccactggcattgggttcgaggggcgatgggacgcttaaggttcgtgatgatactggttctcgtagaggggcgatacggagagagagttgggggagttcgcggagtattgattcatcgaggggccgcaaagcgctcgcagattccattttggtcagctctcacagaattcatctcatcctggatctgacatatcatccatctttggggggtcagatgaagctctgataagatccatgcgataacggctaggctcggggcggtgacgggcgccagtaaagtgggtccgggaggtgtctacgtcagcttccatttttgtccaattgccgagatcccctggcaagggaaacgattccctttcgaaagatatcccattggactttctttcactcattgatttgatcggattctatcatacaattgaaattctatacttgatattggtcctggtcctagaacgtgagttgtcttcctctctatggaagtagcaagtaaagctaccgggagctttgtttatgccgacgctccaagcgaattacagctaggaccaaagcacgacaattgagaagacacaagggaataacattgaacgccacaggtcctaaaaatgcccaccatctttccactatggccacacatcctctttggcgtccttgagcctatctccctgtacgaccagcccaatcctttccttgaaatgcaagaatactactgacttactatccttaatgcagggccctcggtagtgcctaccctatctacaacctccaaggctttatcgccgggcaaacccccaacatcgcagccccggccaccctgcacccaagcagcgtcgcgctcgcctaccagctcggcaatgtctactcactcctcttcctagtcggcgtgggtgtctgccatgcgacaacggaaccaagggtactccgcaactatctaatcgggctggccatcgccgacattggtcatgtctacgccacgtacttggcgatgggctgggacgcatttgcggacgttgcggcatggaacgctttgacctggggtaacatcggggtcacgatgttcttgttcgtcaataggatcgcttatttcctgggcatttttggttatgcgaaggcgccgaaggcggctgcaaagcgggactgaggtgtgacctgctcctttggttggccagaccaatatgcactcgatcattttactatatctcaaaaaagcaaagaaagttaaggcggggtctttggctttggatcgctcccctccacactccactcccttgcgtttgcgccagactgctcgtctgcgcagtttaactttagccctactctttcctgtggcggctcttcggatggaatgggtctcatctgattcgtaggttcttggccggcgcatatgggatgaacatggttgggatgtggccgggtggatatgccggtatgcttgtatttgcttgactgggttactagtggggattgtggacgagatgggctgatccgattacgttttcagctccaatgagcatccactgttaaccagctgtagatagaaccttgaatgtgggaaaaaaaagaaaattatattcatattagcataatgcaacgccggactccccggtgctgccggatgctagcatgggtatcagaatagaaatacagatcataaaatattataggaggtcgtcatctggttgtagatcacctaccccgtgggaagactgccaaggaaaccaccccatcaatgcattagctgctgaccagagaggcaagcaatcgaaacagcccaccggtcataccacctgcagccacacaagccaagcacacaccgatgtcgattgctttacttctcttgtcggacccggacccggacccgaagaggaccatagcaggccgctgatccggtggtcacatctgtgggtctattaggtgctttgcaggtagtgaaaaaccggctgaaggactgcttcgccgttttctttgtggtcgcggaggtgggggaccagccagggaatgccggggaagttctggtagtgctggcgatagacggcgaagttgtcagccgggctcatgagagagacgatttcccgtggaatcagagcctcgagcgtaatcgggtttccttggatgttgccggggcgcgatgtcaagatggtatagatgtgcaggccttttatgatagccgtgaaagagtggtaatcacgggttgctaagaggaactgttcggatgatcatacggttagagggtgacatttgggcctcggcaagtttgggagtaaggactgctcacctgtgtgcattcctgtagatatggaatcaagtctgggagtgcggcgcagcattcccagactgaaacgcttagttcgcgccactggactttcagttgttccacgatgaaatcctctgttattaggctttgctgggttaactcggcaaattggtgctcgtccaggcctctcatgctgtcggccaagtctttcggagatgtcgactggagacaatcgtctaggaaaggaagagaggtgtcaaatggggtctgccaatccatgataggagtatggatatactgtcggcgatatcggattgttaaaacagtcaacattttgagcatggcagtaagccttcctggctggtccttgaataaggcctggatagggcctgcgatgaattcgaacccagcggtgttgggctgaggcaagtcatgatttgcgccaggtcgcacagctaggaggcacttgaccaacgctcggtgtgcgaatggactgcccgaccgaagatactataaaagtcagcacaggctctatgtaatgatgagtatagctgttagaatggacgaacgtaccttttccacttcggtatacagaggaatgtcctccggatagacgcccagatgatcctggagcataatataaagagccgcatgctgctgcaggaaccattcgacgaagacagcgttatacccgagagcagcacgtacaaactcttcaaatgggatctgcctgaattgaaaatggctctcggcctcaatcgctgcagcgattgcccgcgcatctagagtagggcttgactgtggtgggagccaactccaaggcatctcctggaaaggagatatactcgaccggcgcaggatctcctccaccctctgtatatgagaaagactcccaaggagctgggactcgtagggctcggacagtgcgctcaaaaaggtttctatggtgtcgacattccgagtgcaaagcgaagaccttgggaagtttgggtcgcaaaagagtccgaactggatcacacgcttgatttcttggatgtcgaatgcccagaacaccgttgtggcttcgtcttcccaccagcgataaggaatgaaaaaggcgggaatttccaggtcgagttggaagatcgccggataagaatggccccagtccgaggcaccaattctagattgcgcagacatgttcatttccttgaatagtgaatattgcatgtccaaggtctggggaggtggtccaaagaccgattcttctgggctggtcgattgcatttatgcggtttccaacgggacagaaaagcaagaccaacacattgggcacagtacacgctggacgctcatgtaacacggcgcttgaatagagtaattacagggcagggataccctggcgagcgatgtatgccaggcgcgacgcgggagagaagggagtgagtatgggagtactcgtatgtgtacgagaaataggaaaataactaaatagcgcacagataataaacaggcgggttgctcggaaaggtgaaggtgattggttttttcactataaggccagagccgatggacttctttatccctgttactcgttccgccacgttcgacacatcacgagggttgaaaatgagggggggggaactctgggcacgttaccaacaggggcgctgatctcagttcccagctgaaaggttccttgacgggaagaatcatcgggaaaaggggggaatattgtcattgggaagtaaatagggagggggcgagttactcaattcggatcccaggaccggacctccaggggctctagatcggggataaactagtgaactccataaaaaggaatgagatctgcaagttgggcctctctgctagttaccgagattgttacatgccgaacacccgttgaccgttgggctgcagaaaggaaacgatctgggtcagttaacaatatgacaagtggatagtctcccaaaggagttgcgaagcggtcaacctacaaaggaaggaaagatttaaaccgcaaaggctaattagtcggtcaaggggggtggatacacaaagtaatcaatgtgagtacactatgggatataaatgagagaaagataatctaaaacgagcattgggccaggccctcccaatgtacaccaaatggacgctaacgtaggctaacgtagtggccgtaatcccatgtgagtggagtcttgacgatcaaagaatatttttggaattcgacaaggaatatacgaacagaacaccgaacaccttggaacgtttgcttttcatggaagtccgcgccttggtttgtccgtcaatctagggccggagtatagaccatagaagcatcacaccaagctgggcggatttccaattcaggtaatcaggaacaagtattgaactttgtgacctgaagtggcggatcttttatcattattatatcattattgccatagccttgaatagaagcgccgattaacctttcgctctcgttcaattgaaaagaagatggccttgatatcggatccttgtgagattttagcacaacatactaggtacaccgctacacactgacccctccaaggtctgacatgatagcatctgaagcccagagtattggcatatatagcattcccactgccggtggaacaatccccactagttacatcacaagcgttggttctaagcaagatagttcactaccggcaggaagtccaatgtaagaaattctacgatgggtatattctccagtccaatcagtccccaacctcaccacgtgaaatcccaagattctcagacccagttcctcggaactgggacggatctcggtagacccacgccaaagtttgtggggagtgtcttataaaatggtgatgtccctgagtttcggggttcgtgagtctatgagtttctaagtttccgagtctaacttgagatctgattgatccaaggccccatctataataattagagcatatgcagggaatgctagagcgagccactagtactaataagttctaggctcaacgttcgcatttccgagaaaccacatgactagccacatatactactccgtatagcctcctactctatgcagcatggaccgacggactctacttccgtcgcctggtatcaccaacgatatatacaagctcgcctgattgattgcacattgaacaaaagtacacatttcaagtgggtccccacttaaggagaatccacaactgcattgtcctgcatcccccagataatacattgtgcgtcttgtgtagctcagattccaaattccatgacaaatgctaacatattagccagtacagccacccagccagccacccagaatgcatcaagccaagatcccccttaccacttggttaccacctcaccttgaccatttccttgaatccacccctacaaagcccaattgatcggtctccacggtgcataaattgacgggtcaggaatccatcctacagccacatgctgtgcatatttccagctggacggcgcttggaacacggatatattatcctccgtatcctcagtggagacgatccgaacgtggcacggccgactaccaggattgagtttggatctatctgattatcctattctctcactatgataagctgccggggaaatttaacagagagaatatacttccaatgactggatgcgcgagtcatttggctatctcagcccttgctttctttccctgcgatcactcgggaggatgtggtaggtgcgtccggattgaacggaacaagcgccgattctatgaggccattgctttccctcgagccgctccaacgtaagaacagcccatccggaagagaatgggaggattcctaatccgacaccggaaatgagtgagttattcttagactctcgacccgctctcgccattccttcagagatatattcagtacaacttagggagtgtcgatatatgtatgtacctaactttctccacaaatacccctgtcaaacccaaaaaatccatgtatagatgtactaaacaaaagaccaagttctacgcacggccggtggtagggcaaatctgcgataactccacatcgctgttgcatcgcatgagctagcgccacatgcgggacacacctcgattttcatcacggagcacatagttagcacgtgcatgtcaatccccatccaagtccatgatggccctgatcgccagtactgacctttgggggtgatgctcggtctgctatcgcgcgattcgggccaataataatgcgtgagcatgcgaattgaaacaccagtcgagaagatccagacttgagttttctgatcgccatcccagtatgtaagcaatctccgcgctcgtcttacgtgtaccatgtacaccgacacgggtccgacacgggaggaccgttgcatcggataagccgaggtgcggtgatgcgctggtgctgtggattgatcgattcgggctaacggggttgcgccggagatgagtatgtaggcaatatattcctgagcgggatgatgcatgtctcagatcttcagcttgaaacggtttgggcgggttcagccgagggtttatttgtaggaaatattggtccagacgagctggattggtgcaagtaggcttctcgccgtatggcatctgcggttccgatgcattcgcatgttgactacagattacagataggaaaggaaatttacgtgtccctggatcttcatgagccatggagaaaaaaaaaaagagcagatcatccagaaataggtggaagggttgaagatccagggaataaagtaaatacggtcattaaatattcgaaagatgtaatgtcaaatggtatcatatcactcggaaacgaagcggttaacccgttcctggtttgtttgctatggttcgaacctacgagaatgcattatcaaagcccgtcaagcaagacaagacgccgtttcccagctactgtttttgtttgtttttaagctgtcagctaatccacgatatcagaagatattgtgaatttagttggcgagctcgtgggcacggcggcggtcacgctcctcagcaatggagagctagaaaagaatgttagggtaattcaaagacacacagtattagggaatataacataccttgacacccttgcccttggggagggaaacccaaggcttctcctgtccaatgacgaagacgttggactcacgggtagcgaactggttgtcaagagcatcgcgaacgtggacgatgttgaaaccaccgtcgtgacgctcacggtgagtgatgacaccaacacgacccatgttgcgaccaccagtggccatgatgacaacaccggtatcgaacttgacgaagtcaaggatcttgccagtggcaatgtcgaccttgacggtgtcgttgaccttgatggcagggtcggggtagcggatgctgtagagagcaaacgcaagttagcaaaaccatgtcctgatctaatgggatcttactgtttccattgtcctctgccgatcaaccaaagcttggtccaacgactgaatgacacggaacttgtggagtgtggaactcacgttcgcgcatcgtgcgtaaccaagaatgggatcccgcccttgccgagctgaacacgcttgaccttgcagagcttgaactcagcctcctcagcctggatgcggtggacggtgaaacggcccttggtatcgtagatgagacggaagtgctcgccggtcttctcgagggagatgacgtccatgaatccagcggggtaggtggtgtcggtgcggaccttgccgtcaaccttgaccagacgctgcatcatgatggccttgacctcgcgaccgttcagggcgtacttgagactatcagcaaagagatgttagtgattgttcgtcgcgtgccgagatattcaaggtgtcgcgtgcgtaccggttacggatgaagacaatcagaggaaggcagtcccggagcttgtgaggaccgggggaggccttgggcgcataggttccggacattttgtccaagagccagtgcgagggcgcactgaggcgcttctggtgctttccgctgcaaaagacattcttgttagtgatggtgttccatttcgagaaatttttgatcactctcgcagggactggctgaactcgtaatccggcagatagacgagaccagtgtgctgaatagtgatgtagagggcgatctcatgatacttacgggccgcgcattttgactgatttgtcgactgaaggttgggtggtcggagtgtcgaaagagaaggctcaagccgagaagtggtgatccaaatcagagaggaattcgcttagtgtgtggtgattgtgagccctattctccactccgaccaatcagactccactagtgggattttagcacttgcttatgtcatctcagttcggggccctgatccacccgtggacacgtgaatttcctctttaggaatcaagaccaatgagatctaattcatttgtacgaaaatttgtatctatttgacatgcgctgataattccacttttccgtatccaatttaaatatagcccttgataacagcaacctcagcgttgaggatggatgacccagcagctccaatgacagtgttgtgagagagggcagcgaatcggatatcaaagtgaccgcctggggcaccctcacgaactcggccaacgctcactgtgtaaccgccgcagatgttgcggtccaggcggggctggggacggtcgggctcatcgaacaccttaattgcgggctctggtgcggaaggagcacccaacttctgggcctcggacttgtactcccgcagagcctccttgacctgctcggcggttggggtctgacggtctttgaaacgcaaggaaacgaatgccatgtggccgtcagtgacaccaacacgggtgcaagtggctccgatgcgaagaccagtctgctcgtcgaagccggtggcgttggcattcaatgaacccagaatcttttgggcttcgttctcgagcttgtcctcctcgccgctgatgtaggggatgacgttgtctaggatgtccatggtgggtacaccgggatagccagctccagagacggcctgctctgtgaaaacctcgacttcctcgacagggccaaacttggcctggagagctgcgaagggaatgacgatgccaataacagcgcagttagaattgcagaccaggaagcccttcttgagaccgaagtgctcgcgctggtgaggaatcagatccagatgttgggggttcacagtgggaaccaccaaaggcaccatggggtccttgcggaagttctttgcatttgagaaaacagggatctcagccttaatgaatgccatttctgcgtgaaatgtcagtgccgggtctatttgttaaatctgatacatctgatatcacataccggtctcgccagcaacatcgctgttcagtccagagaagacaaggtcacaatccgagaaatgttcaggcttgcagtcacgcatgaccaagttgctgagtttctcagacataggagaagcctgcttccaattcacggcatccttgtacttcttgttggctgaacgctcggaagcacccacggcctgaagctcaaggaatgggtggtctgccagcagtaggatgaagcgctggcccacggagccagtggcaccgagaacacctgtaacatgttagactgaacgatgcatggaatatcttgtaaaaatttgaggccgtaccgcacttcttctttgggaatgaaggagccattttgctcttgagtttttatatgaagacggatataaatcttgcgtaagttagcaaagaaaagttccaacaagtcgaaactagcgatcaatcaaaacatatatagaagaacaagggtttcatgtcgaatcatgacctgtatgagtcaaagcgttcccagagccccgcaggcagtatatacgaggctctgccggcttcaatacctcacagaccacatggctcagagtcgcaggggattttcataataaaatcttaatatgaaacactattgtacttaccgcttaacgggtgatgtggttgaaggcttgtaacatttcactccgacagcgatatcgctctcagccaattgccttgccccgcgattagtcagcagtctacatccggacaagtgtattgctccccgattggctgagatatatgggtctttggtcaaagtttaatgtccaagggtttggcttgtttgcattctttcttcggcctgtgatatggcaaatttcttgacccctactcaacgtcttcatataagattgtatcttggtgcttgggacatattcggcatcgaatagaatgacatctttatatgctatgagtcctgggttatttcgctctctccacttgatatcgatctcatatcactataataccgattttaaagcgactttcaaagggaagtagtagtaatatgatgatgcgatgtactccgtcttgaagttcctggagcccgcctttagaggtatattcttttgtaaggtgtataatgctaagtagtaatgctaaatcacaatcaatgccctgggcccggtgtctcgtcgtcgtagtcgaagatcttgccaggattcagcagccatttcggatccaatgagcgcttgatactgcgcatgacattaattgtgtccggtccaacttcctttttcaaagatcctttcttgcccagcccaatgccgtgctcgccctgtagtaccgaattagctgatattccggtctctccgatatgaacgacttaccgtgcaagagccctccatttctagcccacgatcgaccatgtcgtacactactttctcgacccgcgccctctcggcaggatcggtgcggtcatacataatgcttgcatggaagtttccatcgccgatgtggccaaggatactggcgaaaaggcctaggtcgaccaattctttcttagagatttctggcaggggtcagtatacatgcaatgaagtcaagattgaagaggccataccaatgatatcaggaagtcgagaaatgggcacagccacatcagtcgaccagacttctgatccctccttgcgcagcgccaacatactccacagcgactgcttccgcgctgaccacaggtcatgagcttcgcggtcatcacgagcgaattcaacagactgcgcattgttattcttggcgagcttcgtcgtcagatcgatgctatccgcgacaccggcgacagttcccgagaacttgaagaacagcgtaggagagaccttccattcacggcctgttccacccgcgcgattaataacgtccatttgaacatcatccatgatctccatgcactgcacagagacacccttccgaatgacctgcatagcagtcgaggccgcatcacgaatagtcgggaacgcgacaacgccaacgcgagtctgctctgggagcggggcgagcttcaacgtagcctcagtgacgataccaagcgtaccctcagagccaacaaacatgccggtgagattgtagccggcagaagtcttgcgcggacgtctgcgtgtcttgatgatgcggccatcagccaggacgaccgtgagattgatcacccagtccttcatagtgccgtagcggacggcgttggtgccactgcagtttgtgccaaccataccgccaatcatggcagatgggcctgggtcgacagggaaaaacatgccggtatccttaatcttctcgttcagatccatccattgaatggagggctgcacgacgatgtccatgtcgtctgggtggatttccaggatcttgttcatgaaggcgaagtcgattgtcatgccgccgagcggggcggagaaattggcttctagactcgatccgcccgagtagggaatcatgggcatgcggtatttgttgcatatcttggcgatctcggagacttcttgggtggtcttagggtatgcgattgcgaccggaagacggtcagcgtttaggctagaccattctgagaagccgtgttggtggagctcgtcttgctcggtgctgattgcgtcttcgccgagctttgttcttagctcattgatggcctggagtgttgttagtttgaatggccctggactggcgcgagattacgctgttgcaactcagtgatctaccttttcaaaatcctttactgagccatattgtggcttcttggaggtctgtgccggtgtctgggtatatgaggagacgccgtagcctaaccccgcagcaaatgcggagacgagtaaagccttggcgggggtccagaagggtgagggcggagcgttcgtagatgaggaattgctctcttttgtgtgctctgttttcccagcatcggaactgtttagtctagcaccgcgagctacaatagtgcgcgagacctggggccgacaaatcgaagccggtagccctcgtgagacccggaggactggtcgcattgtggacgactagaagatattatagaattgaaccttaggagctgttgtgaaaggggaagaaagaattcgatatgcgagcatgaggtgatcagccttttgtaccttgaccttgcacctcggacttcggccgagaaaagcagttagattggtccttcataatgccataatccactataatttcactctctggccatcttctcattaccgaagatgtggagaagagccgaacgtgggggcgaataggaacaggaacggagttgcgtgcgaagtccggtgagcggtatttgccgccaaatgttctgcctgcagtataataatcgtaaagtatttatactgaatcaaaaggtgaaggaagtctaatgctccatatccattcaaatgtcctcccgagggaataatggccgaaaaaactcacaaaaaggacacgatatagacattgagcaagtaattcaaaggttttgcgctacggaacaagcaataaagtccggcggtgagacaggcggtcagtatttactatgggatcatctactccgatgattctttcttttctatagctgcacttacatacatattgtactttgcatttacggtttgatcctctttcaagagtatatgtctgtctatgtatatgtagctaataagacattgaacggagagaggtagaaaattcaaggcgccaatggttgacggggcaaccgaggggtagaacctcgtacaccaacatcaactttagaattcagatcaatcgcgtactgtccaccaaatccacgaaactaacatctatgaaaattgtgaagcaatggcagagcaactcgctcaactagtgcgcgaggtagaacgcctaatcactacgccttacgtgccttcgttacaggtaagtcggtcgagactttcattaaagtatacatgctgataatactaggatctccatgatttagtgcagcacaccaaatcttcgacaattggcacctgggcattgtgtaaacgctgccaagttggcttgttggctgatgtcctgattgaagccttatcacggtcacgcgtcgcgctgcctctgatcactgcattcggtttgtgctggcttaatggaaggcttgttggaattcgactctgacatactatagcatctacatcatcgtcttttagggatgcgctgcttgagcgacatccggtgattttggatgccttcttagaaaaggccgtggacactaatggcgatgaggtaagcttcgttcttaggagccaacaaacggtagccgaagggcgtcaactaaccagttcagtatcttccggcatgtattgcgttattctcatcgcccctgccagcgagtgttgtaccgccagctaggattgccccattcatcacgaagcttgtcagcctgatggcagcgaatttatgtgttaaaactgtagcacctcttcacgcattcatctcaggactcaaaggctcgtcaagaatcttgaatgacattccgtccgaggtcatgtccaatctccagctggagttcaccaagacactgcgcaacctcgacgatcatatgggcaacttgttgtgtctggcaacctttgcgcaaattgcgacggcactagatacaaaatctcaaaatcaacacggatcagaaacgccatggctgctgagcattaagcatttctttggccagaaacggggcctgaaaacacttgacttggtcgtattgcgtgttatactagcttgctcatccagttgtaatctgacgccgtttgaggcgactgagagtattcggctggcgatctgcatagcggacgcaattgagcctgagcagaaacaggcttggatggcaggtaataatcccaagattgctaagctgtgcgagaaggctgtcagagacgttccctatagtcaaacgcaaaccatggttagtattggctgttcccgtcgagacgaaatactaatcactcaatgataggtaattgtcttcttgcacacacttctcccggcacattcattgccatctcagctacgggaagttggcatcaaggtccttttgtccaagaatagccaacagactatggagacgatacctcatcaactgattccacgcctcgcaaagtccttagcagtaagtataggagctcctgtccgtgtacaggttttgacagctgatatcaataggaatctggggaacatgccactcgtcaacttttggccttcaccttcgatgtcttaagaggtggtaaatgcgcgggggcagagatcccaacactacacctggcaaacttggtattagctggtgtacaagaagtacataccgatatcatgctttctaatgtcaagcattccatggtccctatgagggaagtgcttagagagacggttgactactttccccgacagccaagcgaaagtcaatgcagtggtcgagcatgttgtacatccgagctatacacaaggcaaaacaggttgttcctatctctattgggactttacaacatggcatcggcccaaaatggaagcgacattatcatgaaaacattcatcagacgagtggagcaatcaatgccgagcctcgactgtgccttttcaacaacaacccccaaaaccttccgtggctctttcgccttgcgcgacagacatgagcttccgtcaactcaagtgaaccgtaattggcgctctggagttactgagctgttcatgcagaatgcccagacctctcacgacaatatgatgagaaagatcgaggatacgtgctttgacctagaacgtcgctgtcacgacgttgaaggacccctgcgagctaccgaagaagagcgggacagatatgcgagcgaaaacgagcaactgaaaaggcaaaacgaagagttcaacgagcgactcaaaagcgaaaccacagagatggaaactaagttgcggaactcacatgacagttttgttgaacttggccacgaaaacacacgccttgaacaactccttcaaggtcaatactcatataccgaggagttgactatgtcgcttaactccgcacgcgaggagcttcaatatcagcaacaaagttccgagaatgcacttcacatcgaaaaagaaaaggcccgctcaaaggaattggagatgatagctactattactggaaaggatgatcaactggaagaccttcagcaggagctgtgcagtttgcaaatgaagaatgaggagacacgccagagtctagatcaaatgtcgagcgaaaaggccactttatctcaactctctagctccctcgagcaagagcttgctagtgctagagaggcattaaagcaggccaggcttcttgttgatgagaaagaagatcaagtgaaccgcttcgtggcccaagaggaagagttgcgaaagaaattgggatctgcggaaacaactgtgagtctttctgcagtcaccaatcaatacgaattggttatactgacccttctaggttgcgcaacagaatttggaagttgagaggctatactctgaattagaagaatccgatgaaaaatcgcggagtgagattgaaaaactgaaacatgatcttgaagctggagcttctcgggccacatctgaggtatgcctacataagcgtcaaatccgtgtatatgtgaaactaatctgtgccgaatagatagcaaagcatgagacagaaaatcggcgattgcatgctgctatgcaagctgccgctcttgatgcttctagggatgtccaatcgaaagacaaacggatccaacacctggagagaaaggtaatcattaccatctttatatgcaaaatctacacactctaacgtcaaatctaggtgcaagctttacgagacgaacgtgctgccaaggcccgtgagttctcagaggcacaacaacacattggtcgattaatgggtgtaatgggcttttccgctaatgcccctgagtcaaacgcgcctgcaaaacaccagcgaactaggtcctctgtcaacgccactccagctgcaaggatccctcaacccataagcgatgatgaagatggtatacagctggcacagtcctttgaatccataacatccagctttaatggacctaccccaaaacgaccaagagggaatcgcaaatcaacaaatcagccttatgctttgaacactacaggttcaaaggcgaaaagcccgcccccggctatcgccatatctcgctctgtgagaaagccactggcagaggctgaccgcaacagcccgaccaaatcacagccaagcagtggatcgaaacgcaatcaggtggatgactctttccaggagacacaggcccaagggaaccctgaagaaaaccggcttcacgatctggacttggatatggatcttgagttttctaaagactttctcttctcaagcactgcttttactgagtcaacggatcggattgccccgtagtgagaggcttgtccgggtagcgaagttgtgtgactagccctggaggtacctatgtcttgaataattatgatatctatcgtacatgttgcctaccgatgcgttattccttagagtgtttctacgtaagcaataacctacaccacagaccataatcgcctatatggtcttagtctatttttgcaccatttagaagtctgcgttatctaccactacccaaagacaattgtttgaatttgaaacttcagggaggtctcctttgttccttattcctttctatctcggattagggtgattcatttgcttgtacccttctttttatgtgttcttcacctttgccagtattgatgtatggacatagtacactattgctttcactacctcttcagctttctaaaggtagcaaataactcattttccactagaatatcactagggcattagaaggatttgaacacgccccgtaaagtagccatgtttaactagttggactatatgttcagtgaaggtattctcagtctcatatcacttttgagaaggagaaaagagcagcaatagtctcatttgtaagtctatattaaaacatctcatcttcgcttgactgaattcaaactgaacaactggactctcaaatgccatccctgctatgtcttttatccctcattttatagtcagttctcttggctccagggccgtgacaggttaagacggtcactttttcgtataaaacttgtttccgcgcgctccagtgttctatatgaactcttaggatatcgttatttacgcgtgttaatctttcggtttccgttagtcgctcatttcattcttagtcctcctttccgtttcttatttgtcccaatccttccttccgaccttggaagggtatataacgtaccctttcttctcctcttcttcaacttcttctgcttcttcgtaacacaccctactctcttgcctgacaaccaagcgcacaatggcaggccctgatatccccgacgtgcaacccccgaggtccaacccgccagtccggggttggacgacctggagatcatggaggacctgtgcagtggacttgctgaatgtcccaagggaaatgaatacccacgacatctacgacactttcaacaagtacggcaatctgatctccattgatctctgggaggacacctcgggccggcctatttccaaggcacgcattcgtttcaagtaagcatcctgtcaatccatcatgctctttacatgctttttactgatcatctataggccacctccagatgaggatttctggagaaccggctccttcggggtgaagctacggagtggccgtgtcacagcgctagcgctgtgtgtctgctgcggtgattcgaacgggaccatccagagcccagtccgcccagatgttcagcttcccggtgaactggtgagtgcatgcatgacatgaagctatcttacaatactaatagttttttctttgaaggaactgaagaccgtacaagttgacatcggtgtcctgctaggtccatccaccatccattctatgcaaagctttaacaacctggcgtaccccagattcgttgtggatgtcatgcgcaagtgcttgtttctctacttcaaagtgggcattcgcggatcggagactgctgcagacgtcatacagcatgactatcgtgtcaaaatcacatttctccaactgtcccagatttaccaacagtacgacaaagccacgagagaacactcctttgttatcgtcctaggctccgccgccatttggcaccgaaaggccaaagagattcagtctacattgacagaaccgttgagctggagagaagaggatagttggtatcgccaaacctctgtgacacataacccgaacttgctaaagaatctccccacaaatttgaagaagacgggacatatcattgacttgggtaagtaccggtatctgttatgatattgtacgctaaccagtttttttaacaggacgatggaacgtattcaagatctcattcgcaccggatgtacatcccgatatgcgtcgtgtcgacgataccagtcactacttgatgcgcgttagagaaatcttcaaggattataacatcaacgtcaaagatggaagtcactttattgagaaagcagaccggccggtaccagtgtggcattgggttgactttttggagtccaagtctaacaaggcttccgcattgctgcaagatctaggagatcagaactatctacatcttcctttcaaggtgcggtatcaactagaggtttgcttgtcccagggatatctctctgaattcaccatgacccgcgaattcgtagagagattgaaggacctcggggatgaccaagctacaagactcttagagttcgttgcaactgagaaaaaacagtaccttgaggccatggaaatctttggtctcaaattcttcagaggagtgactgactcgaagattccgagctactgttgcttcatgcacacagcacgagtcaccccgactacaatttactacaataccccaactgtagacatctcaaatcgagtcgtccgcgaatggtctaccaaaggtgcacctgggcgctttcttcgagttcgatttacagacgaaagaaccgaaggtcgcatcaatgcttcactgagcgattccaacgatgagatctacacccgtgtcaaaaggacactggccaacggtatcactattggagaccgtcgctacgagttcctcgcatttgggaactcccaattccgcgagcatggcgcatacttctttgcaccagatgccggtatctcagcggggactatccgagcctggatgggtcaattcaaccatatccgaaatgtagccaaatacgccgcaagactagggcaatgcttttcaacaacccgagctttcaccggatcctccgttcaaactgttacatgcgatgaaattgttcgtaacgacttcacgttctcggatggtgttggaaagatttccaaattccttgcccagatggtcacatctcagcacaacattaaaaccctcacaggagaacctccttcggctttccagtttcgacttggaggggccaagggcatgcttgttatctctggagaccctctgcctcaggaggtacaccttcgaccaagtcagcaaaagttcgaaactaatcaagccggcttggagatcattcgctggtcccagtattctctcgcgactttaaatcgtcagttaattcttgtgctttctgctctgaatataccagatgaagtcttccacagtaagctcaacagcatgttgggtagcttccatcgagccatgcgcaatgattcgaaagcaattaaccttctccagaagtatgtcgacccaaaccagatgaccctcaccttggctcagatggtatctgatggcttccgacgaaatgaggagccgtttgccaataccatgctcgagctttggaagtcctggcatctgaagcatctcaaagagaaagcaaagattgccatagaccaaggagccaaccttctcggtgtcatagacgagaaaggtgttttgaagggctacttcaaaagcgcattgccgagcagaagagcctcttatgaagagagactggctgctcttcctgaaatcttcgtccagatttgccggttagatggagatggcgagtacgaagtcattgaaggtctctgcattctcgctcgaaacccttctcttcaccctggtgatattcgtgtggttcgagcagtgaaccgaccagaactgcaagcgcttcgggatgtggttgtgcttccccaaactggcgaccaggatattgcgagcatgtgctctgggggtgacctcgacggcgatgactacctcgttgtttgggaccccgatctgattcccacaaactggttcgtcgaatgcatggactacaagggttccaaagcgccagaccttgatcatgatgtgacagttgatgagatcacttcattctttgtcacctatatgaagaatgactgcctcccccgaatcgcacatgcgcacttggcttgggctgacagacttccgaggggcgtgtgggaagacaagtgcattcgtctcgcgcagcttcattccgacgcagttgactataacaagagcggtgcacatgcgagaatgacccgctctttggatcccaagttctggccccatttcatggaaaagcggttcaagagaccatccagcatttacaagtctaccaaaatcctcggtcaactgtacgatgcagtggtcactccggactttgttcccaagctagagaagcccttcgactctcgtatcctggaatccccgctggctgcagcaagtgagacctacatggaatacgcccgcgagctcaaggtggaattcgacatgaacatgcgacaaatcatggctcagtatgagatcaacaccgagtttgaggtgtggtcaacttttgtactccgccacggcttcgtgatcagagactacaagatgcaggaagacctaggtaggattgtgggtacactccgccgtggatttcgccaccagtgctatgacaaagtcggccgtcagggtggaaacattcccgccttggtcatcgccatgtatcgtgttactcaggagcaagtagccacggcgctggaggctcgacgcaaagaggcattgcagagagaggatatatccattgttgaagtgacctccaccgagctcccactcattagcttcccttggattttccccgacgtcctcggcgatgttgcgacgggccgggcgcgacaatctctagtcccagagggacaagggagcagcgattcagcaaatcctaacgatggcacaatcttcactcacaatcagatcctcaagattattgaagacatggatgaggaagtgaagctgaaggctaagaaaaacgtggagccgaaatctgaggagaataccaagccgaaggctgaggcgggctctggctccgcgccctcaaatcaagaacccattgctcgtcgacgtattgacaaatccgagcctaaccccaaccccgacgacgggaataaggaggtgtgcttcgacgaggatgatgagaaggagggaggcgtggaaatcgccgctgctgaggccggagagaagattcgaaagcaggctttgacagaggatatcgtggaaatggagggcgatgtgcagccttcagcacttgacattttgctcgacatgatgaacagctgatcgttcgctcttcgctctatgagacagaaaaaaaaaaaaaaaaaaagacggagaaaatcgaaaaaaacttacacaaaaaatgggacgcaggcgtggaattgcagaccagcgttgtaacttagttaggtgatgagctgcgagtctgcggtgcgaatgaaaccggacgctcgaatttcctccaatttttagaactaagcagcaaaataacaatagcctgtagggtatatccaggtcaaaactccaattgcttcaaagcactaccaatccaatccctcatccgccttctgttccaacaattcaacgacaggctccaacacagccttggtgtgtctccaattagcagcatctctggtcctcgagtagaagacagggcaatccaagctatcacaactaacctcatcaccaggagaaacgcccatacaagagcgacaaatagcttccagaccaacgactctcttttccgcctttcgcagccgcgaaacaacattaagcattgtaagatgcggcttctgcagacagttctcacacaccggaatagtagcattagacaatctcgaccgacaaataacacacgaagacgagcgcatataagactcaagagtcttcatgttaaccccagcagaattcgagagcgtcgatccttcaatgcgccgaatacgctgcaccttcggcatctcatcataccactgccgaacatttgcacccacaagattgaaaatcctctccagcggcggaataatgttcttcgtgatatagtactccgcatcgatctcgagatgcgcgtcatgcagaagcttctgcggcgcaacacagcggtcaataagtctcgcgccaggcgcaccggtgacaaccacgtacgggacgcgctcgccggtctgcggctcggaacgcggatcctccatcatgcgctttgtgctgatcatcgcgccggcaggcaggctgcgctcggagtacgtccccagtcggacttcgcgggcgaagcagaagtcttggatggagacgcggccttgcatgatctttgtgcattggcgctgaaagtaggattttacctgggagaggtctgcggtgcggaagagcatttttagggctttttcttcgattttttgttcggcaggtgtgccgtcgcgtcggacggtttcgatgccctttgcgtcgaattcgggctctttttgcgcccggtgctcgtatttgaagcctacgtagcgtttcttcgcgagcaggatgcacgggtgatagactttttcgaattttagtttgatcgggcgtgggttcaggtctgttactgcttcagcgatttcttcgccgatgtcgaaggcttggtcgcgtgtgcggcctttgaggtagatgaatagactatcggtgtcgccgtagacgacttccgcgccccagcgttcgattgagtggatgaaggcgatggctttttcgagggtttctcgtccggtctgtacgatgctatcggcgatctcggaacagggcattcgtccggagaatgaggcagatgtgtagccgtatgtgacgtttgcaatcagcttaagcgccagctgtctgttgttcagaagccgctgcaagaccttgtcgtctttgtctgccttcatgccgtttttgaccatcacgcgggtttcaagaatctcagaaagcatcttggccagcagcgactgacgcgcttcttgattcgcatacatcataccatttggtgcgatgttgatattgttcttcagtaactcgagcagcctgggctgtcgcttgtaatctaggaaccccatcttatctcgcccacgccagtgcattgctctgccaaggaaggttgagtagcagtagttgtacgcgatcatgacactcgggtacagtgactggaaatcaagtaccagaagtgggctagtgtagaagtcactttgtggttccatgaccaggggcaagcattctaatgcgttctgttgtccgacctgctttttgcttggtgagacgaggaggaagttctctggcttcgctattcggaacatcagagactcgactttgaactgggatccccgggaaatcacagaggcgaaatcaattcccagcaatctcgcttgctcgcttatccttgttgtcaattcatttgcctcgataatttccaaattcatttgcacacgagaggtgaaatattccactactttgaagagattgcgaggcttgccactttggtgccatcgcgtcaagtctttgggggaatagtgagggattcggcgatgcaagacatgaaagacaacgttctccatcgtgtactgtagcaggttgagctcgcttttcatggcgcgccagatgttaaatatgtgtcgcccagtgatacgaatggacgaggagtggttgaaaccccactgatctgcctctttcccaaatcgtccattggactgcgattttgtcctcgagagctcctcacatatgtcaaagtcatacttcttgcgcgctcgctcaatcacatatccccatgaagcgttgtggacctcgtagccggcgattatgtccggatcgtagtaacggacaatatctatgagtcgggttatcaggtccagttccgtgggctcacactcgacgtcaattgttaatgcctttgatattttggcttccggcctctcgccttcgccatggtaaaccatcccaacatggactcccgggagatgactattgacctcaaaatcctcgtcttcggattggatacaccagaacatgcaagtgatttcgtcctcctcggggttggccatgagtgttccgcgcgtgtttacatgcacttctaagctcattgtgctcatgtgctgagcttggtgttccacgctagtggacactgcatgctgtgagtatttgaagccatgtgcgttcttctgtgttgggccctcaatctgcgagagaaagacggatttcatcttagtaggtgtggcttgggctgcgcttagtttgaagtctttagaggcttctaactcttcaaaccactgtatgacttccgacctgcttggcgggacaggagcaaactcccagaccctggcggtacacttttctcggagttgccgatcaaccttttcttgctgatctcggtcgtgtgctgttggtatttgctcaccaaacattgcaggtgcctctgccgttgggtcgaaatttggtagatagtgaattgtgttgctccctagccgaaattctctgccgccatagtctctgggccgttcaggcacatccctttcgttcctgtaaaatgctttctggtatacaactgaaggacgcccatattcatttagtgttgaactgacttcgctagaagttgggctcgcaaatttgaagaaacgtaatgaggtgtttggtgtaaaattgaatgactgctgaatgtttttcatgttcttagcgagatgtggatctaaagagactggacccatcactgttgcagacgaatgtagctccgaagaactctgaatttcacttattccgcccgacaattccgtgccatatctagaagggagagaacttaagcgaggctggaatgactccggatcctttcttgcagaatttggctcatcttggctgtaccgcaaaatggtcgaaggatcattgggatccttgaccaccgggaatttcaggccgctagtataactatgcgcctttggacggggtgttctctgcgaggaagatgattttggttccgatgacggcgtttccgcgtaagaatccaaattgctatcaaaggagacacttttgtgtttgtcgtcttgctggtgcttccgcgtactgggtgattccaatggcccgccaggcaagccgtgtttggtcatgtgtctagctcttttggtagacgaataatggcaatcgagggtttcaaagtgttgtcttttgggtgttacactgctgctttgactctgattcctgggccgtctttcttgggctacacaatctccttccttgtagacaccatccatagttgtttctgtgttgtcagtctcagcaggctcttcgggtgcaaccaaatctgagaagcgtatttcgtcaaagacctcatcgtaaaagctctccttcagcgtgtcttctttcatttcagtctcctgtttcgttctcccttccaatgaggacccttcttgatcagaatccgagtaataccgtccgtcaggttgagatgatagagctagactctcatcaaccgaaatttccggcaccttttgctcggctgggtcctgagaacggctggtatcaaaggtcaaagtactgattttatcaggaaagaagtcctcaacactatccaacgcagtcttcacatttttggcttgggcgtcgatattcaagaatgtcccgaatgtcgtgtctttgttgtcatcatcgcgtttctcgttagcctcaagctcagacgccatctcacggaattcttcctcgtgtatccagccagctctcgactgatttcgtggatctgcagacattgaaaccaattcctcgggtccaaacggagtgcttccggggtcagtgatacccattctcttcttgcgtctgcgagtttcgtcctgccatagtccagccatgctagggacgagccgctcgctaaccgcgacaggtttcaacagctcggtgaaatcatggtgcaaaggccgttcctttacatcaagacggttcaggatatcttgaacacaaatatcaacctccagcgcgcaattgctttgtttctgtaatgcagggtgatcgagtatgctctcgggtggaactgaacgatcgtgccagcgatgggctagattgctgagctcgagatactcgggtactggagctcggaacttgacttggctacagttcatggttgcacatccgtacaagttgtagtcgcacatccattgcgggatgtattgcatatgtgcctcgtagggctgaagtgaacgtttcataacagctccctggtgcagaagatcgaccaggcgatttgtatggaaggggtttaagagataaattttgaagaaaaaccgccatcccacatggtatccgtagaacgggactcctttcaccaaggtgatgtgcgccacaaacgctgtcctccggtcatatgcatttcggcgaaagctgaccgccagagcatgatcgattgaaagatggatagatcggattgcggagtttactacagttttggtaagttaaccctcaaatcaccaatgactattactcaccatcttctggcgccaaagacccggtgtattcgatgtaaaggtatggaaatgcgccatggacatgtacgcaaactctctggcctgtctcggtggctccaaatattcgaatcacaggcaccttgggctgaaaatctgtctccgaggcttcatcacgaaaaggtagtggaggatccaactccgacgcggtcgcctggtaatgatcgatacagttgagacgcacacggaatggctccatcgctctggtgtgtggcgaccagaagccacagcaacattgcgaaggataaataaatcacgcaccgattatcgcatgtgtgtcctctttggcatctgtaggaatatgtggttgagaaaacgcgacatagatacgtccttgacaacgcgcgataacgcctagtcacgtgtttcatatcaaatccacccgccaagctcgggcctgtcgcaacttcactcatctcatctcacaacagagagagctacaggtggcttaatctacttcctcacttgctttcctttcttcccaggtccaattttacccctcctcgttgaacataccagtcatgtcacgaaaacccgcagatgtggcgtcaaaaacgcctaacgagtacattccgtccttcatctcgaaaaagccattctacgttgacgatgagacaaacaacgattacctcgaacatcaacgtcttcagaaagccattcccgatcaatcaaaatggtatgatcgaggaaagcgtgcgggtccagcagccaccaaataccgcaaaggcgcatgtgaaaactgtggcgcgatgacacacaaaaccaaagagtgtttgagtcgaccccgcaagcaaggcgccagatggacaggaaaggatattcaggcagatgaacttctccagaaggtcgacatggggtgggacgcgaaaagagatcggtggaatggctacgatgccaccgaatatcgccaggtggtcgaggaatatgaagagatggaggccatcaagcgaatggcgaaggatgattcaaagctcaagaaacttcaagccgatgaagatggcgatgaggcccccgattcagatatccggtacgccgaagaatccgacatgggacgacaacagagtaccgcaacccgaaacctacgtattcgagaagacaccgccaaatacctgctcaacctcgaccttgattccgccaaatacgacccgaagacacgccgaatggtggatatgggcgcgcaggatgaccaggccgctgcacttgtcgcagaagagaatttcgtccgtgcttcgggcgatgctgcggaattcgagaaagcccagcaatatgcgtgggagtcacaagagaagggtctgcctcaactacatatccaagccaatccgacatctggtgaagttcttcgtaagaaggagatggctgatagtgagactaagcgcgaggcgcatcgcaaagctctcctggataaatacggtggtgcagagcactcaaaaccaagtgcgctgcgagagacgatggtggttgaaaacgagcggttcattgaatatgacgagagtggtgccatcaagggtgcgcccaagaacgcaactaaatctaagtaccccgaagacgtgatggtcaacaatcatgcctccgtcttcggcagctggtggtaccaattcaaatgggggtatgcatgctgttattccacggtgaagaacagctactgtacaggggaagatggaaagaaggctttcgaggaagaaggcaacatgttaatgatggctggagcagtcgatgataatgaagaggtttccgaagacactggaaatgcggatctctctcacgagtctgagcaggccgatggcagggatgaagagcagctttcaaatcccaatggtaaaaagcggaccctggaagaattgaagtcaggtatcacagaggaggaatttgactcatacaagcggagtcggttggctgccgaggaccctatggcgaacttcatagggaaagattgattctgatgatgttctccatatactacttgcatgggcgttcggatgtactaaaatacccttgatatgctgttgaaacagtgaacaaatgcacaacgcaataatttgtgttttaaattttttttcgtatatagttctaaaacaacctcaaaataacatgcctcaatgagatatctagaatgaacatgaatcaataggatatcctatctaccactctgtaatttgttgactttcgatatgatggttatcacgtgatttgtaatgcacggaccgtctaattccaatgagggttggtcggtcacgggatccggttaagccctgataggttcacgtgattgactaacgcactcgcttagtgcacaatcgccagatcttgggcaagtttcgagacgcttagcgacgacgacccgacaaccagccccttcaacggaattgccaggtacgtccgcatactggtcccttgactagtgttcacttcaaccgcgtcaacttactaacacatatcctcatccacagttccataattcaagatgagtacgtccgatgccgactcatcgcaccgcgatcctccgcagcgtcgaataactccaaactaacaaccgccatagctaagggtacctcaagcttcggaaagcgtcacaacaagacgcacactctgtgccgtcgttgtggtacgtattacacctatttttcgcgatttcacccatccgacccgcagtcgcaaaatttctacatcgaaagacggaattagcgattacgccgaacaacacacaatctagcaaggacaagcgctaacctgtgatatttacgactacaggcaagcggtctttccacatccagaagtcgacttgtgccaactgcggctaccctgctgccaagacccgcaagtgtacgcaaatacccctcccgagaacgttgatgatatgaatggtggccattatttggaatttgggcaccaagtcgaaaactctggcttacatacattttctacgaacagtcaactggggtgagaaggctaagcgccgcaagaccaccggctccggccgcctgcgctccctccgcgatgtccaccgccgcttcttgaacggcttccagaccggtacccccaagggtgcccgtggccccgtcaccaactagattccctttttcgtccgctcggcgtcgcgttttcgttatcggagaggctggaataggaatgaggggagggatcctggcatgacgtgaattagcattacgggatagcattactcgaaatgcaatggcagttccggactcttatcgctttcccgtggagttggtggtgtgtgcaactgtcgatcacgttggttctctttgccacgtcaaggatgacaaagtaggacttgcagacgatgggaaaagtttcgttgaggggctctttcctacggaaaagagctggattaaaaaaaccccgggaaagcgtgaatgaatttcctttttcttcgtttatggctggcgaatatcccatgtcatgacagatacaatgtgaacactcttcctaccatttcatggtctgttctactcagtacgagcctctttgaggaccagacgcagagacttgaattggacatgattcaatggctgtttctgataagctcatgattctcgtgaacatctaacccatagtatacagcctcggctcatgattctccacgaccaaacacccggacaccgccatcccgttgaatgaagtacaacgcctctctctcctcgaggttctctttttcactcgtgttcagcccaccacctcggctgattctcagtacgccgctcacatcttttgcggctccagtatccaaagtgcgcagctgcatgaccgactgagcccgatgcgccagcccaataacaagtgccgcatgttccgtctccaatggtgtagccatcttcacatccgatgtggatgcattttgtattaatggggcatctgtagctaacgttaaaaccgtagcatgtgcactctgtcgaacatagtcagcctgccgtaaactttgcctatcaagtgacaagccttacctgttgtagcgctgtgatccactccgatatctctgttgctccaatccccatactcggacctgtcgcagcaaggagcaggtcaggctggtctataatgaggagaagctcatcaccatcttccattgaacttttttgctgttcaatcactgatgagatatctttctctagtgcgtccagggaggcgagaccacggccagagaattggagcttctttgcaatcccaggttcagccttcgtcgtcacatttcctctcactcctctagctgttggcaccggctgtggtgaccttccaggtacagcaccaggcggagaccgcattgggagcgttgtgcgtggacttcccagaccagccggtgagatactgggaggagtggatgtagcttgcggtgcgtaaaacagctcagacaagccatctatgaatgcaaactgttgcttatctgccagacgcgcaaggtcgaggccctataaccttggttagtgatgtcgaacaaagtatatatcaacacataatataagaagtagaacacaaatacatgttccaattcaactatcagtaaacctgttgtctgaacttaccaatcgctttgcttcggtcctccagaattcatagctccgcatgaagctcaccagcaccactttcttcttgataccattttgcggctcgtctgagccaaatgccacattgggatttggtgcgctcagcgcagcatgaaggaatctcagaaccagccagttcgaagtcgcaccaaggatagaagagaccagcgtcagagatgaatcaggcaaatttgatacatatgaggcgaggaggggcggtagtgggggttgagagggcatggttgcgcctcgatccggatatcgatgctatcctttgttcctagcgagttgaaggtgtaccgggctaaattccaatctttcctctccaattattcagtctttgtttgaaaatgttgctgctggtcaagtcgtggagatgatgtcgagaaaaaatgtctccggcttgtgattggcccctcaggtatagccatgccaagacataggatatcgagatgatattgcatagaatttaattctcgtgctgtttctcggtttaccttctcttggatatacgggtaatacatcatatagtctagtatttaactccctaaccatttactattcaaaacctctaagttagaggttctcagaatgatgcgtacaagcaatatatatagttctagctctatactacctcaacggctacacaaaacatctaaaacctcgaccgatgtagttcataggagacaaactacaaggaaaaccatatcagagttttgaaacaacataccaaaccgtcaacaagggccgtgatcagattctgaataatctctgcctgaggcaccaatatgagttttctgcaccatcacctgaccgttttccccaccatggaggggagcgatggatgcttcttatccatcgcattgcaagaggctgtgctctagcgccgatcgtgagtacattctatattctagagatcacttccccaccgctatgtgtatgcgcaccctagccctataatgcttatgtgctatactgatacccgatgtggaggtgttctcgcgaaccattttccgctcattatatcgaatgcactagctaactgttatagatgactgccgttgtatggcatcaaagcgcattggatacaagatataatatatctaacctgcctcgataaagatggctagcacgcgtgattcgcactcatttgctgtatgtattgatcggcctgcatgatagttgagataaaaagcaagggttgaagtctgactttccacatagtgcgacgaatgccgcttgcgcaagtcaagagtaagtgccttgtattaaacccctgcaggcgccggcccatttaacccgggtattatagtgctcaaaagagcggccagtttgtctgcaatgccgacagctgaacaaagaatgtgtatacagccctaaagtcagcagaagtcctctgactcggcagtacgtgaccagaaccaaaagttggtatttagacaaggctgactgactacccagacacttaacctatgttgaagatcgcctacactcatttgaaacagccttaggaaggctgttcccgggtggtgatctggatgctacacttcgttctcttttgcaaaatccggaggtcccgagggccccttcatccaagtcctcttcgaggcactcaacccccaagcatgagccagaacgggctgaaccagcaccagaagctctcccacagcaagccgatggctttgactgggctgaaaaagaaattacgcttggtgatttgacagacggcatggctgcgctgtctattaagcccgaaggagctggctactttggttagttgaatatccattatattaacttttcatttccaactgacacagatctcaggggcgtcttcaagtgttgtaccattacgagcactttttgatcatggatttgacctgaatatacccgtccgctcggcaaggtcgggaggcgtgcctctcaaagcacagcttctggaaagtgccccatccggactgatcgaacaagcgtttatcgacgctttcttcctcaactatcataccagctatccattcatccacgagcctaccttccggatgcagtttaatgacccatccctacgcccgcatggtacggcctggcatatcctcctaaacacgatcctagctcttggagcctggtgcatcggcgatgacagctcagacctcgatatcacattctaccaagaagccagaggatacttgcagcaggcgtctgtatttgagagtggaaatctgacattagtccaaggattattgttactgagcaactatgcacagaaacggaacaagccgaataccggatggaattatcttggtctggcagttcgaatggccatgagtttaggtcttcacaaggaattccctggctggaagatcagtcttctacaaagagaaatccgcagaagattgtggtggggagttttcatcttcgacagcggcgcagccaagaccttcggaagaccgatcctcctcccagaggacagtgtcatggatgcgaagcaggttcgaaatatccacgaagaggtatttggaaccaagatataacataaaaaaagtagcaataactaataattacaggccttgactcccacaacaacaactttgccggccgaatcggccggcccaaccatctactccggcttaattgcccaggccagattccaccttctcaccaatagcgtctaccaacgccttatctccagccccagcctcaccccagaagacacactaaacctgcaaaaacccatcgaagaatggtacaacggtcttccgtcttacctcaaacacccgcagttgcctatctccatgcagccagcgaatatagacccggactccctcgcactcgtgcgcaaccgcctgctatggcgaaactggaatctcacgattctgatctacagaccaatcgtacttcgctgggccgccagacgctgggccccacatagcggcagtccaggcacaccggacgcagggtccgaagaccccttcgaaacagagtgtcgattacgctgtcttcaaaatgcgcgtctgaccatctcctccatctcggagtacatggcgaactatatgtgcaccagacttggagcttggtacatgctgtatgtattcctcaaactaataccccagtcgaacgacatctaacataaaatagctacttcctcttccaagcaggcctcatccccatagtcttcctaatgaccgacccttcaaacccagaagccgccacctggctacaggacatcgaaaccacaaaatccctcctaacccacccctccctcggcacaaaccgcttcgcaagccgctgcttcgaggtcatcaaccgattgctcggcccaccaacgcactcagtgccaaacggactcccacccgacgatggccagctcgactcccagctccagcaccagcacatgtctccgcagttgcagccgaacatgatgccattccccgggcagctcttcaatgatcctgaattcggcgggagcttgtttccggtcgagcagcatatgcaaatgcctaatacgggggtcatggatttttcggaatgggtgaatttccccgcgacggaatgaatggctgtggttttgatattgatttcttttgtttgtatgtatcttgcattgtaggatgggcatatggagaaatgggaaaagacttggaaatagttatataggtatcagcgaatactccaatacatgactttgatagtgtatctaacgtggcatcctatgtcaagagtttcatctgtcagataatgggaatgtggttttttaacatgatatgtatgtaaataagtgtttatttcttttcccgggtcgttcaataaaccgacgatccttgacagggattccccgcaatatcaaactcacccacctcgggcccaccaaactcggggaaacgctttgtcccaggctcggctttccccctttcagttggagcggagtagacctctccgttgatcttcattctatcagaccatgtgcctcgatctaagctttcggagtactgtattccttcttcatctataccccagacggagtcctgtgttcctaaacagcagagggcagttcggttacttgacttggagtcatataccacgatataaagcccagcgacaattctttctcatctgttcagaaaatattgacatattatggctactactgcagatagcaccccgaagggtggctttgcgcttgtcctacagaatccctttctctgcggtgttgcatcggtaagtgtctgctcttgacatatcgctgttcattcattgaactttgcacagttctcgaccctaggtgggctgttatttggctatgaccaaggtgtcattagtggtgttatcaccatggagtcctttggagctcgatacccccgcgtcttcgcagaaagcggtttcaagggttggttcgtgtcaaccctgttgcttgcagcttgggctggttccttgatcaacggaccgatcgccgatcgagttgggcggaagatgtctattaatctggcagtggtggtctttgtcgttggttccgttattcaatgcgctgctatgagtgtcccgatgctattcgccggtcgagctattgctggcttggctgttggtcaattgaccatggttgtgccgctgtacatttctgaggtttctattccagagattcgcggtggacttgtggttctacagcaatgtaggttgttcttgaggttgggtatggctcgtcgactaatttgtgttcagtatctgtcactctcggaatcctgtttagctactggatcgactatggaacaaactacatcggtggtgctagatgcgctcctgaaatcccgtactccggtggtacaatttcaaagcctaccttcgacccatatcatgatgtccctgctggtggctgcactgggcagtccgaggcgtcgtggcgtctccccctggccctgcagattgtcccagctgtcatcctcggtgttgggatgctgttcttcccagactcgccccgttggttgttgatgaaggagcgtgatgacgactcgttgcacgcactctcaaggctgcgccgcatggatcgcgatagtcctattctccttaacgagtatcttgaaatcaaggcctctatcatgctggaaaattcctttgcgagggacaatttccctaatctctccggatacaagttgcacgttgctcaggtttgttgccaattcaccatatgaccggtttcgctgacactttcaaaagtacatgtccttcttcacagcatggtcccgcttcaggcggttggctattggttgtatcgtgatgttcttccagcagttcatgggttgcaatggtatgcatgtcccctcatcaatctatagtagtatctaattgatatagccatgatctactacgcacctacgatcttcgcccagcttggcctggatggaaacaccacctccctccttgctactggtgtttacggcatcgtcaactgtcttagtaccctccccgcgctcttcttcatcgacaaagtcggtcgtcgacccctgctcatggcaggcgctgcgggaacttgcatctcgctggtcattgtaggcggcatcctgggtggcttcggttcctcactcgtgaataataaatctgctggttgggctggtattgcctttatctacatctacgatatcaacttctcctattccttcggtgagatcatgccttgtacttttcccccgacaaccaactgacaacatcttcacatcagcccctatcggctgggttcttccttcggaaattttcaacctttcaattagatccaaggccatatccatcacaacctcggcaacatggatgtgcaacttgtaagtagcgcgatcaatcaggtattcgattcgaatctaacaactctgtcttgcagcatcattggccttgtcacgcctgatatgctcgagtctatcacctggggcacatacatcttctttgctgccttctgtcttcttgcgcttgcattcaccttcttctgcatccccgagacccgtggaaaggtatgttctgcaaccctcttttccagagcggaccgctttgtccatggaagattgacgatgctaactatttccaacagacactcgaagatatggatctcattttcggtgacacggccgctcacgaagaaaagaagcgcatcaagcgcattgaagccgagttacgcgggacaccgattgaagaagatgatatcgtcaagccggttggttcccatgtggaactggcatgaacgccaacgtcgactcaaagagaaggttacccgtacataatgatttattcgaagcaggacgtcaattgtaatacaaggaattgagataatgcgacattggcttcatggctccttcccaaactggaagttccccgtgtaaacaaagaaggcaaacaatatgaactggaaggtggcatgtgacattgatattgacagggcaggtgtgagggacctgtcgcacttgaggaaggcacgtgggtttggggtataaaaggacccttccccccatttctcttcttctcttcttcttctctcctccccatctctctggccaccatctctccgtccaccccccctcccctccccctccccttcccctcnnnnnnnnnnnnnnnnnnnnnnnnnnnnnnnnnnnnnnnnnnnnnnnnnnnnnnnnnnnnnnnnnnnnnnnnnnnnnnnnnnnnnnnnnnnnnnnnnnnnnnnnnnnnnnnnnnnnnnnnnnnnnnnnnnnnnnnnnnnnnnnnnnnnnnnnnnnnnnnnnnnnnnnnnnnctcatgctgcttaacctaccacagggatcataacattaccatgtttgttatgaggtctatgtaggtctgcatcaaataacaaaccgagctttctcgtggaagttcctgaagtcgtggctctcattgccatttgacaagtcccacggaatacatgtagatagccatagccgagttgaactcctagacttaatcctccacgtattctaatgtctcctttgtatcacagaatcttttgtgatgaggtcctcgcagatggttctaacacgacgccctcccaaacgcgtaaacaaaggtctctgtagccttgacttggtgctggccttctgttatgtctctactatctatcacatgccaaaaacaacaatgtgaatagaccttcgatgtcagccctgtggagaatggcgtcagtttggaatttctagcctattccgatctatcaccaagaccgggacttctattccaatatttgaaaaaaggaaatgttgagaatcgatcacaagatgcctctgagcgagtactggattgggtcaatgacaacggtgatatcgactctgtgcagcccatgtgaaacccatcttcactgccaaaaccaatacaacttgcgtgattatgcgcagattctccaggggaccactcacatccagatacagccaccaaagaacagctacctatcctcgagacacacgtcagctgctagaaatggtttctcaagagccatcaggtgcaaaaggcagcatctgacctgtccagcacaatgcaataaatactcgccctgctggcatcaaaccccagatcaatcttccattcttccagatatcccaaattccaagtccaaccatgccaccctcaccctccaccctcctccacatcggcatcctcctcctcgaaacaacccaactcctcgacctatccgccatagacctcctctacatgacaacccccgaatacctaaccacctgcacccccccacttcctcaatccctaatatcaatgagccgaccctgcaaaatgcactacataaccgccaacgccgcaaacccaacgcacacaacctcccaactctcaatccaaccaacctcatccctaacctcccccgccgtggcacccggaaccctagacctagtcctcatccccggcccatcgccgaaaaccatgccgccggcaaatgaatacctggactttgtgcgcgcgcatttcgaggccggcgtgctggtgttggcggtttgtacggcggcgtttgtggttgggtatgcgggtgttgcggatgggcgtagggttacggcgccgaggttgttggttcctgagatgaggaggatgtttcctggggcggactgggatgagagggttagggttgttagggatgggaatttatggacttgtggtatgttttttctttcttttttctttctttcgggttcgggttcgggtttgagttagatgtatatacatgtatgtgcatgctaatactactaggcggaatcaccaacggtcacgatctagtcatagcctacctgcgagaccattacccagccttattagtgaatacgatccttgccgctgcggatatcactccgcgtccggtggcgtatgctacttccgcgacggaggatacggataccgtctacgtggtgtggcgggttattaaggcattttcgaaagcagtggtttggttctttagtaagaagtgagtgttgaccttctagaagtgtggtagcattccaccgacgtcatcccgagtaccccgaggcttaaaatgaggatcgaggattaaggtttcttgtttcttttgggataaattaaataaaaactaaaatgtgacatctggtagtacgtagtactactattttgttgaaacgttattctacgtgtctaaagcgaggcacacagatatggttcaatagtagtgcatttcttgcagttccaaagcctaaaaaaatggagagaagaggagaacaaaaacaaacacagaccccaaggtttgcgaaaaacgaaggaagaaaaaaaaaaccaatcaatctgggcgagaacgctcgtaccatgcaacgcgctgcaccacgctaaagaggacaatcatagagaagagaagtgaagaggggaagtgaagaagagaagcgaagggaagtaaagaagaggaggaaaatatgaagcgtgcctaccctagacccagaagggaaaaaggtaagtttcatcagaataacttgagagcgatgtgctggcctagtccctgacaacccagaactataatacgagtcgagccaattaacccagatcattaagaaaaatgagacaacgtgatccactgctcttatcatgcatgacagcccggttttatcgtcgttcatgcggttcccaatggatcggttcaaagtcggaattctggaaatgggcttggttgtacggggaactaagagaaaagttagtattagtaatgaatgtggacctgaaagtgaaacttactttttgaaaggtggcgtgactggcaacgatcggctgagattcggcttcatcaccaacgggttcaggcggatctgcgggccgtctgacgttcgactgggcaatgaagtcatcggtggcggggcggaggacggtggcgccatatgtggagcaggggagacaggaaccgacgggatgggcgcgtgggttggcataggcgattgatacatgtcttgttgcggggacatgcggaatggactggcgggagttggcgagacagaaggcattggagacatgggaccacccatcccgaaagatgcgtcctgcatcaggttgggaatggccattaagctgggattgacgtcgaatccgagagcagcctggtcccaggaggagtagtcggacgtcatcccgtattggaggttgactatgggtgccatattcaaagtttcgaccgggtaaaggatatcataatggccgctgtggatgttaaacgtggtcaacacatgctgcctagagaaactcacggtcggtataggaggcggattgttgcaccactgggattatgagaggacagttggtggggtgtcacgacgtcgccttcacttcggtcgaggtaaaggatttcgactccaaatccggagccttcgattacaccgtcgatcagtgcctgcaggccaacttcgtcgatttcggtcttaaccgggtctatccgcgagctgcagtactgattgagtgacatgggtaggaaagcctggtaccggctcgggttgagcttcatccaggcactagtcaagatctgagagaatcagtttacgtcggagggaagggaatgacgcgcatcatccgagacatactcggaagtgggtaatgatagcatcagagcagtagccctcgttaaaagcctcgacgaggaaagactcgtcccgggcgccattctggatagcagcatgggtgcggttgaggacgtcctccgtagcatcgacaaagatctcgtagatagaatccgacagaccgacccgttccaaaagcgaagtaagagccttcattctctggatctcggtttcaatacggagcgtgtctctgagggtgaagagggtctcgaaataaccaaatgccacagctgtaaggattagcgaagatacacatgatatcgcatataaccatacctctccaaccacaattcccgtcgcctttcatgatccggcattcgggatgggtgatagaaagcgcctgggcaagttagacgagacatggtaacggctcaactcaagcttacattcgtctttgtagctagagtaggatccgcattcgagtaatccaaggcgatgctgtggctagactgttttattgagacaaggggaccctgtcgacacggtatcagccagggctgcagaggatagtcgaaaccaattacctggacttcgggctggtagttgttggacagcttctggaagcgctccatctcgtcggcggagagcgcattcatattggcggggtgagaggagactggatgggagaaagcagttgacagtgaaagcgctacaggcgagagaaacgacgagggaagggcgtcccggtaaaaattgacgggattctgcttttccgggaacggctggtgaataccgaaatgattccaggtaggttttgataacatcgcatacggtggagttgtgcttattcgagtcgaagagtgcgcagttatgccaatgttgtctgagggtgttagatgacagagaataaaataagagagaaaaaaaaaagtaagaaaataagatgacatacagctcgaatggacatttcctttggaagattcgggcgaaatacggcttcacacttttgcctcgtacgacagtgtgtcccagaatagcggatcggcttttactatcagagtctcagcatgacgatcagacgcaaaacatgcagagcagtcattgatgggtcgaatgtaatccacgagcacccgggggacgaataggaagatacaagaagtaagacgggacgggtcaagggaaggttgtactacaagccgctaggactcctgtgatgccaaagaagttttgtgatgaagagcccagaagcgtccgcttggaatatcaatcacatgggaaatcagagttccatgatgtcaggaggatcatgggccaagaggctataagcgaccctcttcaatgagggggtgcacgaaccacacgagtgagttttgacagggatggagctgagttgccagagcggatatggattccgggaaattataaatggaggagatggtccccagaatggaaataaggccgtgtgtatgacacacaatgacaaaagaaagagagcgatcgggggagttgcccacctttgagggtgcagatgagataatcacgggggggccacgaccgagtccgaaagatcgctggaagaacgctgaaagacggaaagagtagagaatcaacctctccaggccgagttggaggagttggaggaagaggagagatttagggggaagaagggagtttttgcggggacagaagagagagagaggaggataattggtgaatggcagttggccaaaaccaagtcggcgtggaatataaaaagaagaaaaataaaaagaagaaaagaagaaaagagagaaaacgaaaagaaaaaagaaaagaaaacaatgaagtaacatgcaccgcctacagaagagctgaacagctcgcgtaaacgccctggattttggattttaatttatgaagttgtacacaagttgtacagagttaggtatacacaaacgtatagatatagatactcgaataggaagaaacacatatccgtatatcgatatcttccctatctcaactacttcctaccctacgcctctgcacaacccttctactattgagtatcttaactatcaaatccctagtatcaccccccacttattatccacccaattgccgccggcgtcggactaatcggagctctatcattctccacggactcgcccaacgcatacataaaacagatatcaaacatataaaagaaataaaaaacccaagcgaaagggaaaaaaacgccaacaaacccgccagggtaaaagcaaaaggccccaaaagcggggtttgcgaaaatctccagggctgagagcgacggggataattcgttgggctcgtgattggtgcagcgccccgatttgatgcaacggccttttgcttttcctttctttttctcgtctcgttattttcggcgctgatggtggcattggcttttgtgttgtgttgtttttcttttttctttctatgtcatcctatcattttacccgagtcggtagttgtgttggttgtgccttgattcttgaactgcccatcacccgacctgccctcggacattctattctattctattcctaaacctatccctcaccctattccttgataggctattcgtatttctttgatgtgatttcagttcctaccggcccaggcgcagatagagctcatatgccggtagaaccaaattacatccaacgtcggacccgatctggagaatgaaagaaatcgggaactgcccgggacagaggccccatagctgatgcgcatctatcatgcaatcctataggagataaggaaatgtgttcacatgtctttggccgtacgtcgctttgcattttacctttctttgtatcggagtgttctttttccgattgtaatctcgccggttttatctgatgtatatatatttcggggcacatcctaggttgagttaaagcttcctacctacggtatactaccaagggatttagacttcaatatacaaggcagtattctacggatacctactagtactacacctaataccgaccctacatacactataaaacatacataaacataaacagttcatcttatcgtcattttagcgctgtcagaccaactctaaatagcggggctgattctcagtcctcaaccgaacaaagaaacggtgagttcttctctttctgttttccacgcggctcagccatatatgcacacgtggaaccaagggcgcttagagaccaaccgctggaaaaagcctagaacaaccatttggtaggcatcttgcctcgcccgtccttgcgtgcacggggcgccgtgggtcgcataccctcgtctccaagactcgattggaaaatcgacccttgggagggttcgttcgcccgcagcccctcaccgttgagtgttgtttgccagagggtgcgcagcgcggagctccactctcccacagctcgcagccgctccacgtcactcgcactctccactaccaccgtcccattatcctggtcaatcttggcgttgagctttttgtccaggatgaggaaactgagaatgtccagcacctcgggcacggagaccttgatgtgtttggagataaattgcagcgaaaaccgcgtgtaaggcgcaatcaatttgaggaccgccttggtgcgcatgttgcggctcacctcgtcgatgttctccgcaatgaagggatcggccaggacgtcgggattcttgctcagcacgtcctcgtatgcatggatgtcgtctctttggaaggcgtccaccaggtcggtcatcgcggaaatccgggggtcattcttgtatggcttggtctcctgcgaatcgaacgggttgatgtcggacttcatcagcatggtcgtcaagacaaggtatttgagaacctggattcgttgcatagaacccgcctcgtcgtaattccggaacgactcgaaaaagtcactttgtgcctccttccagttctcttcgctcatgtgcatcttgcctccgcattcacggataatgcccatgatcttgggatgcggcacggccgaccgcactcggagcgcgcgctcgtacaaggcctttaatcgtttgttattcttcgtctccgaggacatctggatctctagcgcgtagagctcgagtaggtatgttcctttgctggtgtcgtccgacccgtcctctcgttgacacgcacggtgtaattcccgcatcttcttagccagctggccgtattgcttgcgctccagccacaggcgagctagtttaatatttgtcttcagccaaagccgctcgttgtttgtgttttggaacgattcgagggtcagcgagtagaactcctccatgcattgatacgcctctgcattatcggatcctttctcgataaagtcgagcatattgttgatcgatttctctgagtagtttcgtgtaacagcggatttgacgtatgtgagcagttcccggtagtgtgcgacggtctaaaagatggagtcagtatctgggcagctagatcagcgagatgagcttacatcgctgtatcgcccgagcttgaattccagcttgatagcctgctttagacctttgaatcccctatatcccatagttagcattgttgcgatcagcctagcagcagtaattaccagtcgcctttgtcttgttccatgggcgctatgcctaggaactcgtcgactgcctcttctggattgtcgaccttgatttgcttggcattgtagtatttgttctcgattccgatatcaccggaatcgtcgtcgtcggcgtcttcatattcaaagtcataactgtgattccggtcagctagtctggtaggtgaagtaaacaagggaccatactcctcatccgcagagtcctgcataaaatcatcatcgtcagacatcctaggcgtgtaatagtttgaaaacagcagaaggtggttaggatagagaggacaaagtggtggggttggagtgttggagaagctcggtcggataacagctgcgagcttccgccttgactatcgtgaggagagcactgacttggaattgtattcacggtgcattgactgtatgcgaacaatgtcgattcagtgtttgaataaacattgtccaaaaggtctatgctcattcaaagctaattttgaatggtttgtttcttattgttctactccatcgaatcagcctatctacggagtacctactccgtactgatggttcaagtgccaaacatacatacgcgagctattctaagcatacgaggcgtggctgataactcaggctatttacagcaaaaaggaaattaagagttccacctagatagttgtacttgttaccgtcaggggcttggtatgtgatttgtagtcctactagactctctacatgttgaaaacgaattgaatgtgagctttaacatagtaggaataggtccaagccaggaaaaaagcaagagaccctaagctgtatacaacttggtagtcttttaggtcgatcccttctagaaggtaggagtataacgctcaagatctaaaacactcaggaacatgcgcaaagaacccatacaatgtagtatgaaacagttataaaagatctagttaacagttaaatctcaaaataaaaaataaacctcggtggaccagaagggggctgatgccattcgccgatccttcagccttcagctcgatgtcattgacttagccagtcctggaatcttcccccgacaacaacctctctcttctactgtcacctaattcttccaactcctacgcgtaccacctcacacaccaaacgcacaatacgcggacgtactgtcccattaccccctcatctccttacttggagtctcctgaatcgctcggcaccatgcagctgtgcggccggcagaaggtggtccagcgcaagatggtgctgctgttagttttgatcggaatttccccgctaattattggcgactggtctgacattattccagaggcgatggtgcctgcggcaagacatcggcgctgaatgtgttcactcgtgggtgcgcaatctccccctcacccgtccccgatgatgacagcaatgctaatggactttgacaattagcttcttcccgacggtctagtaagaaatcctacttcttcggagcatactttaatgcaggttactgattctggttattgtctgtgctcagcgagcctacagtcttcggtatgcgcgcattcccccggagttgaatctcctgaacctgcagtgctaacctcggaggaatacagaaaactacgtccatggtacataataacctcactctactcctctgaccacgatcccagaaactcacatgccctagatatcttcgtcgacaacatacatgtggagctctcgctatgggataccgccggccaagaggagttcgatcgactgcgtgcgctgtcctacgaggacacacacgtgctcatgctctgcttcagcgtacgacaattccccctgtatatccccgcatataacctaacatgttccgatgactaggtcgacagccctgactccttcgagaacgtggcgtcgaagtggatcgccgagatcaacgagaactgcccgggcgtccccgtggtcctgaccgcactcaagtgcgatctgcgcaaggacgaggacatgaacgacaaccccaataccatcagtttcgaccagggcctcgcgaaggcaaaggagatcggcgctgtgaaatacctgggtgagtgctcttcgatccatgtatattcgatccccggctcacattctttctagagtgctctgcggtccagaatcgcggtatcagagagagcttctacgaggctgccaaggttgctcttgctgttaacgcaggcagtggctcgtcctctggctcgtcttgtgtcattctgtgaggtgatgcattgcggtctgtttttgatacgcatggtattgctctatgtctgccatattggccttcgtttattcgctggatatctatcctgggaaggcctatttcttcgccatctgtttcttttttttctcgtttctcaccacgtttctccgtctctcccggttgggtttgttgattcccccatgcattaggtgttctgagcttgctttcgacttttttttttcttctccgggcagactatgtctgctccattcagacctcatagatatcggtctatgttgattgcatgattgcatagctctggatctccctgttccgagcatttcagcgaggtggttttttggctctcaattacgatacacaaatgtaatttttcttagattttgcagacttggtactttgttttctacagccgagctatcaaacagcatcgcacgcccaagcaacagaaacataaccctaccaacccaagcccgcatcatccaagcataggatcttaggataagccctatactagccgggtatcgttcatcaaatcctcctccgtaaccctataaacctcatcaatcccctcccccagcgaagtcccagcaaaatccgcattaacccgcccaacaaacttctccacaaacgcatcagcaacatccccaatctccaatcccgaaacccccacaccctgcagactagtcgcctccctgccctccaggccacaagcgacaatctgcttaaagaaccacatcggctcatcggtaacattcagcccgacgccaaagctgctaatattgcgccgcagatgcacccccacagccgtgatcttcctcggctgctcatccgatcctgaccccgatcccggtccaggcttcacccacacgcccgggtcttccgtcgtaaacccatccaccccgtagctcttcagtaggtcgatgacgctgttctctaacacacggatgtggcaccgcggcgtgaggcccagtcgcttgaggtccaggatcgtgtatgcgaccatctggcccggcccgtggtaggttgtctgtccgccgcgcagggtcgggtggtactctgcctttgcgggatgcgtgccgtgcgggatgaagagggagcggatgggttctagcggtgcggggagggagaagttggggtctgttggggagggcgggcgtgtgtttgagggtgggaggtcgcggcggccggtggtgtagacggggtttggggtgaaggtgatgattgttgggtctgggggcgggggtggcgttttggatagggtggtgcttgggttgctcagctcttgggaggatattgagcctggggaggtgagctttttgtgtgcgaggagccgggttgtgagggcttgttggaggtgcgagacgcggctgaagggcgttgtgtgggggaggtggaggtgtgcgagtctcattttggtgcttttggtggtgagatgtggtgaggttttcggtatataaggatcgggtttctcagcgcattgtaggttggagaagagtttgcgttttccacggagtacgaggccggttgttgcggagaagctgtgagctcgctccgataaggtttgataagttcacatgccaatggcctctatattctctactatttcgtatcgacagctatttgtgttgataccacttctgtgtgcctactctaactgcaagcccaagccatttgttaagctaacaattttagaccaatcagcgcaaaggtaatcatacattggcgtagaatggtctaaatctaacagccaaatggtaccatgtactcgagtttggcaagagtagtgctaatgcggtaggattcataagtccattgctatacactcatcattcatccaaacggaaattagagtccaaactatgaagatgccacgccattgaccagctcagagttttgctcagcaggaagcagagcccagtcgcgcacgccacccttccaatccgcgatgcgaccctcggtaactcttacagtaacgagtcgcacatcagtgtcaatggaaacgctaggccgtctcgcgctaggatcctgttgctgctgctgctggccgaagagattgatctcctcctcctcgaaagtattattctccaaatgacgagccttacaccacgcttcctcctccgagccgggctccaagaaccgcgcctcgcccgtaatggtagtcgagatgctggacagcgcgctagtgttcaggttaagcagcaggctggcaagggaggagcgggtagcggcgggtggtggagagccgtcacggtcaccttgcgtcggggcccgggtaggggggcgatgcgacacccagtcgtggaccagcaatgagactcgcggattggacagcaagtggtttgttttccgcgatgcggggtttgtggtcatgatgatggtggggtgggggtcgtatggggtcgaggggagataggtgtaggacatcagtgagatgtggggtgttttatcatcacatgttgccaggtgcagcttgattgggcgatatgaggttagcttgatgggttatatgttgaacggtgttatacttacgaagcgggagttcttaaggcacgagacgacctcggatggcaatgaggtagcgacatggggatgagtggtggtggcagacgcctcataagacagcggggggttgagtgattcggccatgttagagatttgagaaccaaaaacggtaatcgtgaagttagagcctcgggagaagatcgagatctgcccaccgggcggtgtgcttaggcactgtttggccaacaacgtcatcacttcacgcctgtggatttccaacttccaggcagcttgcaggttccgctccgatttacggatattggttattctgtgcttatcattgggcacagcagagagcactaggccagtgtacacagagcagtatacaatcagtgtacaacatacactgattaggtgtgcaatagcgtggagacactagacaacgtcatagcggcagatatattggatcttattgttatatgatattacgctcgaatacaagaaaacgactgtccacagctctgtaatactcataataagtggcgatgtgcggagtacagtatgagtaggctatgtatccatgtacagatccctgcagaagtccaatagtatcgagtacatctcgccaatgtcatcattacccacatttagcgcgagatcagctgtaaaccgagccaagtggtaccaacgcccctcgtcacgattactcccctaccgaaaacttggggaagctccctccccgcacataagctgcaaccatttgaagtcaacgactcaacagcattgcgattgactcggtgattcacattgtaatcaattcgcagcaactgggacaggttaattctatagatattcagctaatattccctggctctcattactggtactggacatttccatactctccgatccgaaaggtactccgtacacatccacccgatcatcgcccccttcttcaactcctctccctgcaactccagcctgatccctgcacttacctctccactcttctatcccccctctttactttgtttctccatatctcccaccctaaacctcttctcccagctccctctatattgtacctagcttattgccaacgtcggattcattgtcgagctctcttctattgttctttccacataccatcatgttggctccacgcgcagcccgctcagcgcgatccgtgacttccctcttgcgacccttcagctcatcagctgtggcctatcgttctccctctattcgagatattacagcccagtcgactgaggagtacctcagacggcagaaggagttccgcgagaacttagaacaggctcgtttgagaagagaaaagcaagagagtcagtctgtcaatgcttctgcttctgcttcttcccccctccgtgagtacgctcccactgctccgcaagtgagcaatgcgagcagtcaagatagtgaccgccctactttcgatgctgccacgccacttgatcacaaaggcctaggctcactctcaacgcaccgctatctaggggatgaccagcaccacgaaggtctggctaaacgtggccctttgtcctcgctcatctacggcaccaaagagggccagcattttgacaaggatatggaacgctccttctcggaggtcctagcccgcggcaaatacgttcattctatcgtgatgcacgacgtgaagcccgacaaggtcgatgaatatgtggatctggtgggccagtggtaccctcgcatggcacgaaccgaggagaaccgtgtcaacctggtgggcagctggcggacgcaagtgggcgacaatgatacctttggtaaatcacgatcaaataagccaaccgttctgtgcgctgactctttccttgcttaattagtccacatctgggaataccaacgctacgaaggctaccacgactctcttcacagcatctcggaacacccagagttccgcgaatttgatggcaaactcaagagcctgattaagagcaagaagacttcattgatgcaggagttctcgttctggcccacgagcccgcctcgccgcctcggtggactgtttgagcttcggtcatacacactgcacccgggcaatcttctggagtgggagacacactggcgccgtggcctgaaagcccgtcgcgaagtgatggaaggtgtaggcgcatggttcgtgcaaatcggcgaattaaacacggttcaccacctgtggcagtttgccaacttagaggagcgcaagatctgccgcgagcagtcgtggagcgtccaaggctgggccgaaacggttcacaagactgttcccttgatccagaccatgaggagtcgcattcttgtccccatgccctggagccctgtcggctaaattgaaaaagctggaacgtttcctttggcctattccttggatcttggcgtccaggaatcttcattgtttgaatgagccgaattctgcgaggtgtatttcccgagattggtcctacctcatacccttatttatctaccgtcgggatgcatgtatagggaactaggccctttgcatcccatatgtgctgtgacctaggcattaagcgtcgaatccattagtcaagcatcaaacctctttcttaactatcagttagacccctttctccccgtattatttgagcacggatctcactctcagtcctgagcaaaggccctcggataaccccacttttgttcctgtcaacacttgaggcctttcattggcaacgcttgggacccttaggcagatatgttggttgaatatcgacctacgcgtcgattccgagccgacaagaaccgagggaataagtttgtagtcaaatccagcgtatatccatctcgaaactaatttaaggcctcatcacttctctccgccggcagaaaaaaaaagtcaacaaaatacccaagtggcctctttctctcttcaacgccgatctttaatatcaagcctccatagacccctgtctacggctgttcctccctaacggagacctttttttcttcctttcttcatcctctctttcttccctttgtttccattaccctttcccggcgataccttctccgatttccttcattatcacctctcggccctaaacgtgcgtctacgactctcaaaattgcctgaacagcacgtattggcaggcaccgacaactccaccaaatatatgcctcgaggtccgaaccgagtacccaaaaaatagatatccgcgcgttcaccgacgcgcaagacaaccgaaacaatggtgtacatccggcaacatgaattggcgaatctgaagaactacaaatatgctggagtcgaccactcgcctgtcagccggttgattctcaagccgttctacaacaaattcgtgattcgttgcttcccaatggggatggcgtgagtatttccctctccttacttttccccggactatgcatgcatggattatagatcctctggaggcctttttttgaataccgagacgaactatacgcaacgcaacatggaacatggctgactttattcttctttctgcgcgtctacagacccaatgccgtaagtcttgcccatgagacattgttacaattgccacgtataagaaaaatatcctaatctcgctcgcttcggtagatcaccctcaccggcttcatgtttgtggtaattaatttcgtcaccgtcatgtggtacaacccgaacttggatacggactgcccgccctgggtctatgccagttgtgcgattggcttgttcctgtaccagactttcgatgccgtagatggcatgcaggcgtatgtctacacttatcctgacagttgaggtgctttagatactgactgcgtttagacggagaaccagacagagtggcccgcttggcgaactctttgatcacagtgagttactgaatatagtacacaaaaggccaagttcatggattgctaattacttgtttctacgttactaggtgtcgatgcatgcaacaccggtctcagcgtcttggtcttcgcttcggcaatgaacatgggccagtcctggatgacctttatcgctctattcggatgtaagcccagccctgccctgcccttccacgcataaatagtctctgacaatcgtagcaacaatcaccttctatgttcagacatgggatgaatactacacgcaaatccttaccttgggcgtgatctctggccccgttgagggaatcctcacactttgcaccgtctacctattcaccgcttacatgggtggcggtagtttctggcaccagtccatgctggagaccatcggcgtgccgaagcctagcttcctctcaagccaggtgtacaacatgccgttcacgcagtggtaccttgtgtatggctccgttgtgctctgcttcgccatcggctcgagtatcatgcacgtcatgaaggtgcgtcgcgagcgaggccaggaccccttcacgccgctgtacggcctcctgcccttggtggccatctggagtcccatttttgcctacctatacctgcagccgatgattttggagaactacaccatccccttcggattgtttgtgagtctcgtcaatgcctactctgttggccgcattatcatcggccacctcactcagacgagtttcccctaccaaaacgtcctgctgtacccgctcgctctgggtgttttggacagcgcgggtgcgctgttcggcttgtggtccgcccctgtgcttgggtatggtgttgggcaggtggcattcgtgttcgggttattgggactggctgtcggtatatacggtagcttcgtggtatgtttccttcatgtttcccctccgcgcgacaatttgctgatcttgattttcttccagttcgacatcatcaccacgatatgcgactatgtcgatatctggtgcctcacgatcaagtaccccttcgtcgaggagaccgagcgcaagaccggtttgtcgaagaagaccaaataaagggatgtggcgcgattggcggcgcagtcgtgagtgtttcatgggcttgtggagaatggcaaagttcagtctctttcgccacaggcgaaacagctcaattgaggaggagtcgggtatccggattgagaagcgcgttggacaaatgatgcctggctaatgacttttccagtacatactttagtttcccttcggcacagagaagtagcttggagtggcgttatagcgatagaatatgagagttgtaatattgccgttcgtttcgagattgttgtagaagaaagtcgaagcacctgactgcctgccgcagcgagtccatgtctccactcgaaccagcgattgcgcgcgtgcttacctcagtagcttacctcatcagtctttcattggtggaaagttcgccgccttcccgaataaggacaagcgagggcacaaagcggcacaaagccctacctccacccaaaccggtccaaatcccttcagacttctcttagaagaccacctcatccgcatcacacaaggccatcgccatcagcgccatttaatcaactatctcgctgatcgactttcactcgtcaagatggtaagcccattttcgcccttttccgctcggtccctgttcgatgcgatacccacggacatggaagacccatacggattgtcgattcgaaaaattcaacgtccaccaacgctaacatgttgtcctcgataggttctcgcggtcgatctcctcaaccccaccccccaggccgaggcccgtaagcacaagcttaaggtatgaaccaaccgacccccgaaagaaacacgaaagaagaagtgaaaatatcaacccgacgaggggcgaaacctggatattcgacctggacctggacctccgatgctcaccatggagcaaatgggaaaggcaccgaacgacaggatgataatggaattcttctgggaaatggatatggaatccaatgttggatgaacaatgatggctgattattgaacttctctcgcctacagacccttgtgccctcgccccgctccttcttcatggacgtcaagtgccccggttgcttcaccatcactaccgtcttctcgcacgcccagaccgtcgtcatctgcgccggctgctcgaccgtcctctgccagcccacaggtggtaaggcccgtctgaccgagggctgctctttccgccgcaagtaaacgagaaacgaatgaaaaacttttttttcttgttatgttccggttgaaacgtcaaagagagaattagcatggagagaaattaggatgaaaataccaagacccggggttgacctcttaccttttttttgatcgtctcggcttcggttttcggtgtttcgggaagagagttgctattctggcccagttccatatactgggctttctctctttctctcttcctaccgggcttcaaaatgtcacataccaaacaacctttttttcaatatcacccttcccctaccgaaccacacggacatttttcttaactgttttttcgactggtgttgggttgtggggggatgcgattggcatatgatgtgatatggctctttttccatattatatcagtgtactggatcccctcttgaagaagacaaaatttgaatgtggccttttgggctcatttctcatcctatttccacccattgcttgttctttcttttgcatttcacggtgatgattaaaatctcagcgttgaattcttgttttctttgcgcgttatgacagatagaagatggagtgccccgaccctgtcaatgacccccacaaaagcattcaaaaaaaaagcaactagcattctgctaagggagttccggatatctggcacaaaaaggcaccttgcttgactttgtgctctgttttatgttctgattttctgctttcttgtgtttggtatattaaatgtatctgcgactactgtatatcgggttctacacctctatatcatgagttgtacctcacatggctgccaattgtagatgttatggttgtagcttacactgccagacattgtataccgttgtacggagtagttgtaccacatgatatccaatagcctctccgccgagactctaaggtgacctgtagactaaacgagagttgtaatacatacagatagtagctgtatcctccttaggatgtagttattgttgcccctcaggatgactgcgggtcccgggtgttccccaccttgcactgcgcttgtctgctttggtgtaggtttcaaagtgacgagaacgaattatactatactttgttgtcttgcctgatactctatctttttcgactatgcattttggctaaactttgtggaatctataccacctcaggaatgtatatgttatgggtgagaatccctgtcaagaatcgtctgcgaatagtttgatttcttgaaaaacgactcgggaaaagatataaacacttatttacatacatattatatcgaagaaccacagacgaaacttcatgaaattgcacttcaaggaattgacatattgccctgaagccaatgtcgctccttcctctgtgacagatgtaaataaagaaggcaaacaatgtaaactggaaggtgcgagggacggtgtcgcccttgaggaaggcaccgtttgttgagggtataaaagggtccctccccccatttctcttcttctcttctccttcttctcctccccatctctctggccaccatctcatcgtaacccccccccccccccccccccccccccgccagggccgcgagggtataaaaggacccttccccccatttctcttcttctcttcttcttctctcctccccatctctctggccaccatctctccgtccaccccccctccccttcccctccccttcccctccctccccctgagacagcgttgacagagggaaccgtagcacatgctgcttcacctaccacagggatcataacattaccattgttatgagatccatgtaggtctacatcagatatcaaacctggcgttctcgtggacgttcctgaggtcgtggctctcattgccatttgacaagtcccacggaatacatgaggggtgtaaatcttcgtagccgagttgaaatcctagacttagtctctccgcatattctaatgtcttgtttgtatcacagaatcgttcgcgctgaggtcctcgaagacggttctaacacgacacgatccatcttgcatgcgcaaccaaaggcaccctcttttcctctgtgcatattagaagagcaatactaaagcttaagagactgaacctctagtttgaaccaaggttgtatgtacatatggatatgtcatgatacgtttctgtttgtatcagaagcccctggacaagagttgccagtaatgaagagaagatagaaaatgaagaacaagtacagtaaagcccagcctagctcgtcatgatctccccatccccttgggtggatatatagaattaaataaaagactgagctttgaactcttactgaatcaaaatgagcgccttggccttgatctcggggccaaaatcaacagggttggaggggtcgccgccggtcagcatggccagctttccagtagtgtcgttgacgagtgtattagcaaacatattgcggccaccaatctcatctacagctaccttggcagcgttgtcacctgcagcgtacttgttggggtcaacagcctgcagccggttgtggctgttgcggacaaaatcgtacaagaagtagatagttgggtgccggttagggggattgcactgggggtgggcttcaaatgcactgttcaacttgttagcaacatatactactatatttctgcgtggtggggttgtagggtggggggaacatgctcaagtagagcctgcatcttggcattcatgtcttgaatattgatagtatcagacatgacggcgggttgtatatggtatttgtcagaatggaaggtagaattgagacctgaattggatgtttgctgatgtgacgaagctgtttacatttggaatttcctaaataggaccccgcactccgccttccccttccttatctcttatcggacttacatcggagaaaaaagagtccttttcttccaaggttctactctttcctcttctaatgtataaagcaaccctctgctctcagtctttaaaatccctcctactcaaacctacccaagcccacctcctagcaacaatggctcccaccaccccaaccccaacctcaccgcggaaaccgctcaaactgctgatgctccacggctacacgcagtccggcaacatcttcaacttccgaagccgcgctctggtaaaacacctccaaaagtccctgcccctctacgaagtctccgccgcatacccaacaggccctattcgcctccagcccagcgagatcccaggctacgagccctccccagaagtcaacccagacgacgagatcgaagcctacggctggtggcggcactccaccagcgcgaccccgccgctgtatgccggcatcgaagaagggttcgcgaccgtagcgcgcacactgaaagaagagggccccttcgacggcgtgatcgggttctcgcagggcgcggcgctggccgctatggtcgcttcgctgctggagcctggccggaaggagtcgttcgagcacttttctaagataagcgatgaggggggcgcgggcatggatttccctgcgtcgttcgcggaggacgggttccagcatccgccgcttaagtttgcgatttcttactgtgggtttagggcgcctggggctcggtatagggctttctatgagccggcgattcagacgcctgtgttgcatgtgcttgggtctttggatgcgattgttgaggaggtgaggagccggggtttggttgaggcttgtgccggtgatccggacaagaatgggttggttgttttccatcctggtggtcacttcttgccgagtaagcggccgtatcttgatgctgctctgacttttattcgggatgaaatggatggtaatggcatcttctcgaagaagaatgaggccaaggaggtggaagaggatgtgaatgatatggatttgccattttgaggacagagcttgtacatatagacggagctagatttagattttttagaccatgcttacatgtagcacatatacacccctaccctaagaataaagacttgatgattggtactgtcatgagacagaaatttgctgtgtatgggtcatataaaggtcaatgctgcgacttcactactcatgggtctaccggcgaattattttacacgcggtggcagcaatccccgcgcccaagtcctccacattcatctcaacttaatgcgccttgcccatgtcactgcgagtgggctgaatacgggccatcatctcctccttggtgatcagatgatcgatccgctcgagcagacccagcagattcttcatgtcgctgctccactcgttcagaacgtcatcggcatcccggggtttggcaaagttgaccaatcgcgcgggtcggtcgatcttggcgtagatggtcttcgatgtgaccagatcactaatgtacttctccgtctcttcctcagtcagatccagaagctgggtcagacggcccatctgaatgcgagtgtagtacttggccactacacggacattgtgctcaatgacacgcttccgcaggtcttgccacctctggtttgcttggttctccgtagactgctttggctcggcgtcgaacacgtctgtgctgcatagatgggggccgaactgctcggcgaccataggccagcgcatcagctcggggatggtgaacagcttcaacaagcgggattcctcggggacttgtgacagccgtgagtcttgcttgatgcggtgcaggaggtcggattgttcattatcatagggagacaggacgacgtagtacacaatgcgggcgagtgactatagttgggttagtggcaatctaaattttgagataggtaagtttacttacggcacgcagctgctctgggttgttctcgactgcttccgtgtccaggacttcccggtagttcttgcaaacctcgagatatttgctatcgtggttggccaagataatctgctgttcgaagtaacgaagtttgagatctgtgacgtcgtcatccacctctatgggtgcctcatcaggcccacgggtcttctctcgctcctctgcctccttcttgagcgtctcgatctgctcagccgacctcttcggcttgcggttgaagtaccgcttgttgatcttgcggctgagaatctgggcctgggtccagtctccgcgctcaatgcacaaagagacctgctccagaatgaattctgtcttttcccgtctcgtcattgacccaaatgtttccacctgcaactcacacaggatgtctgctgccgaagtgagatcaccttgggtcttcttgatatttgaaagtatgcgggtaacacgggctcgctctacttcaacaaagatctttgcgataattagcatcactttggtcaagatcaatggttctcagcgtacctttccctcagtcactgtgcgcagagtttcgataacagacaacttgacctccaggctgggtgtgtcatccaggaatgtcatcaccgtctgcaccatcttcgttgtggcctgcttgagttgggcatgtttcttagataggagcagcacttggtcgttcagaaggttccagtcgccggagttcttgctgatggtgacaatggcaatcaggagtcgcgatgtagtggcaagatcggatgcctgaataagagaatcttgattagtttgggtaggggagtaatggggtggcactcggcgtcatacctgtctggattgcttctccaaacccagcagcttatcgactgctccctggacatcggtctagaaccatatacgttagcatcaactttgatatggatatcatgtccgggtgtacctttgcgagatcttctgcctccgggatgagcttgtcggcatccttggtgaagtccttctcgggcttcagcaggccggacatgatgacgaatgaggctggagggccggtgaatcaatttaaaatattaataggttagttgataggaaatttctttaagcaggtttgttgcgcttgacaacgtgagattcgcggaatgaaagaggatgatggagatgatgcttgtagctccggtgttgcgcccttacgagctggaagctccgtcccacgtgaccgaaacatcgccttccactctgtctggagtacttgcagttgtcctctcgtctagcacttgggaacatcccagctagtatattccagtctgttatggatacatatataactggtaatttaagccagagctaatgatctatatgttgttctctgatccatgtttcctgttcaacgaagttaaacatgccatagcgaccaatagaagaggctctaaaccgaattttaagaccatctaaccaaccgtcagaagcctctacagctataaataataatttcactataaatcgtataaatctacattgtacctggctgcagcgggatatgattgtgcgtggcctttggatcatggatcgtggtgatttcccaaggtcaccctatgcctactcgggctatacctaggtaggactagtgtcaaatcatatcccgaactacatccagacacatgtatgagcgactgaagagcgacagaagagcgattggattaaacaatagaataggaggtacactatcactgttttcatggagcaagagtttgcccatattgttctcaagagggggtttcgactcgttacatgcgacttgacatttatgtgcacgtcaggctacatactgcgtgagggtagccatatcacaaactgtacattagttgtatgaggaaatacgtctgaaaagacaccattctgttatccttagatttgatgtcctcaatcttattttgagccaaatgcgttagatttccaagtcctacgtcgtcaagaaagaggcatatgcagttaaagaccacgcacatctcttactcgtgtactcccactaaactactttaggtaagtctccctgcacttccccggcatttggagtcacgtggtgacaagcacgcaattgcctttaaccgttttaggcaataaagatgtatagaaatttttagaaagagttgtgcgtctgctatatatgagtcaatggtataagttcgacctcaaggacccttttctgactcttgatcacctttacaaatcctagggcttcctccaggactgtcaattgtgccaggatcatcccccacttcgataatccttatcgcccgttatcaccaatagtgacaggccttttactcagttttgatattcgtcgctttctccgcggaagtctagaaatcacttcattggtcggtctttttgttaaatacaagcttcaattctcttggaccctcggaactccagatccttccgcaattcggtctcgattacctctctcaaaccagcatacctcttactagatttattggcggggcttgacatttcgttctactgtacttcaccatgaaggatgcctcatgcgatcctagtccaaccgcgccatttatggttgcgtggaataccgactcacaagtccacttgattgtcggttcaaattctcttgccgccgctcggtgtgcgaggagcctcgaggtcggcgcaaagccgatcatcattgcgccggagaccgatgacatgcatttcacactatctgaacatattgccaatggctctgcccagtgggttcgtcatggattccaagacgaggacttgacaaccctgggcagagaagaagttgatcacgttgtcgacttggtctttgtcactttgggtagcaacaacccattaagtatgacctgcttgttcaattcacaaaccactcttactcacatttcctactaggttcacacatatcgaagctctgccggcgcctcagaatcccagtgaacatatcagatgcccccgaactatgctccttcaccctactctccacctattcagacggcccccttcacattggaatcactacttccggccgggggtgcaagcttgcatccaggctgcggagggaaattgctgccttcctaccccagaatcttggaacggccatcgacagacttggtgctgtgcggagacggctgtgggaggaggacaatgccgctgggctcgtagaaaatatattcgacagagaggacgacgatagtacaggccaaaagcacaccttcaacaacttggtcacagaagacgatgctgccgctgcaaagacaagaagggtgcgctggctgtcccagatctgtgaatactggcctctccgaaagctagtatctatcaccgatgccgatatggatgccatcctgaaggcctatacatctggcaatgccaccataaatgacacaaacggcgtcgataccccctcaaagaaggggaaaatcgtcctcgcaggctctggtcccggtcacccagacctactcactcgcgctacctactacgcaatccacaatgccgacatcatcctcgcagacaagctcgtccccgcgccagtcctggacttgattcctcgccgaacggaagtccacatcgcacgcaagttccccggcaacgcagaccaagcgcaggaagaattcctcatgatgggtctagcagctttgaagcagggacggcaagtccttcgcctgaaacagggagacccatacctatatggacgcggagcagaagagttcgagtttttcaggaaggagggctattctccggtagtgctaccgggaatcaccagcgccatgagcgcatccctcttcgccgatatcccagcaacccaccgcggcgtttccgaccaggttctcgtatgtacaggaaccggcagaaagggggctgctcctaaccctcccacctacgtacctactcagactgtggtcttcctcatggctcttcaccgactttctgctcttgtcgagtccctcactaccttccccgcagaagacgctggttcccagtcccgcaaactctggcccaaggagacaccctgtgcgattgtcgaacgggcatcgtgtccagatcaacgtgttattcgctcgaccttggagcacgtatgcttggcctttgaagaggcagggtcacgaccaccggggttgctggtcgttggtgccagttgccacgtgctgcacaatccccaaggccagcgatgggtgattgaagagggcttccatggactggatgatatccgcaatgaagtggctgcgcaagtggacgccgtcgctgtgtccgtgaacgagaagcagtgattcaaaattttcttttatatatatttccgagcgacggttgcatgtacatagacagcattcagatacccctagaaacgagatatgcatgatcattgaagagtatcattatttgagaccaattagtattttgaaacacgtagattaatgttgtataaaatgtacacctattttatactacgtggaagaaaagaacagggtgaggctaaaaatagtggaaccccggcccggcgacgttgatcactccacctcattcacatcttcaattctgacaaccaccctctgccgcaaccatgtcggccaaagccccaaagccagtctatttctccaacggggaggctctccagaggtgattttctcccttttctgcgactagatacccaaatcgctgaccagtgtgcccacagccccccgctcaccgtgcgacttacccgctttgtcgagagcatttacttcttcctcggcctgtacttcactactctgttctcggtaggtacctcttacaggcgtgattatatgcgacatattgttttcaccttgcttctcgtttcagcctgcctctctttcatatcccgcaactggactaatctgacatatcctagctcgactcatacgccgctgccgagagctcctctttcaacatcaaaaaccagggaaacaagtatactactcgccctcgctgggggggtggcacaacctcattcggtggaggtggtggtggaggaggtggcggcggtggtccgggatttggtccgcggcgcgtgggacgtgtggatgatgttcgtggaccggagtgcaagagctgccaataagcgaacagtcaacgcgattgaatcgccgcttcaatatagcgtcgaggagagaaaagaagttaatggaccaagatctccggtgccagggtccttcgttttgtcgtctttttggccaggaagcttgtgatatgcgactgtaatgcacttttgatattcagcggaactttgtactatgctacaacaaccttcgaaatacatatactacgggctaatgctggtctattgaacttgatacatcaccggaacttaccgaaactgatagctcaagacaccccttagcgccacaacaccgcctcttcaaggtcacattctgtcaacgggtcgtcatgatgattatagaagcgccacgtgacagtctatgctaaccttggaagtgtagtaggagacttgaaacacatttccggagggaatccctaaacctagcatgcgacgtgctatccagcccaaggaatactacacaaaccacccagcatgagcgccatcccatcaacagacgccgaatgggcgcaaaagatagccaatatgaaggagaaactgccgaaaccctcgctgtcccagccgccaattccaacacaaatcaaccgcacaatagaccacaccctccaggtgagcccagttgaagacgcacagatcgacgcgctgtgtcaagaagcccttaaatacgaattcgccgccgtgtgcgtgcgacccgagcacgtcgcccgcgcagcaagccacgtcaaaggcagcaacacagcggtcgcatgcatagtgggcttcccggaggacgcgcacaagacagccgacaaagtacgcgacgccaaagaggccgttgcgcagggcgccaccgagctcgacatagtgatccggtacaacctgctcaaagagggccggtacacggaggtatacacggacatctatgcggtgcgtcaggctgcaccgtcgccaatcgtcctccaggcgattctggaggcgtcgacgcttgagagggatcagcttatcgatgcgacgatcgtgtcgtgtatggctggtgcagactttatcaagactagcacgggccgggatggcggtacgagtactgagcatgttaagctaatgcactatgcggcggagatgtgtgggtgctcttgcaggatcaaggctagtggcggtatacacaatgctctgactctgttacgcatgcttaaggctggagcatatcgcattggaactactgacggggttaagatcatgatggagatcgatgagggggagattcttgaacaaggatctggccatgcggtggcttgaatctttctgagtttctcggggtgcgtgtctttgacgttatcaggttaatttttttatgtttggcagtgctctatgcttccctgaatccaacagggcgacaatccttactgttctgcttgggacccaatatctctgtatgtagtatgtagttgtgaatagatcgaccccctgcgtatagacccaacgggagggaccggcgcgagaagcgggaaaggaacctagatgatatacgctcaaggattgagaccttgctaaagctcgattgccatagagatgcgcccttggtaaacaagagaagagaagcttgcagagcttctgtgagacaattgtacccacccttgcgcatcttgccatgagagccctgcaagccctgcattacccctttggggttgcctcgcgaacaccctgaccgaaaatgagaccatcccctcctaaggtatttatctcatcttgtagatgtgaaaccctgttttcagaaccagatgattattgaaacagcatacgaagtagctcgtaaaaagttggacataaggctaagctgctgcccaatgaaaagaacacacttagggttaaggctcatacattcaaagacatggatgagaaccgtttcaaggggatgcgacaaaaaatttgggtaatgaattgcactcatatgcaaagttacgaacgtggcggacatttattattgacctgaaagctcccaaatgatatagtatatactaatccaaaaccctgcgccgatccattgacatgccaatcaaaaatccaaggctttttttattcgtcgctctgatcatccgagtcactggtcacagcaccatcaatgtccatcttttgaatgactgcatcaccattgcgacccttcttctcggcagcgagccaagcttcccgtttcttcgtctcgtgttcctgcttccttgcttgccgcaggaccttctcctgttgtgcggcctcctgcttctcatgcagctcattgacataatcctgcagattggcgagctccgagcgcagctgtacaacctcatcatccgcattatggcgagcagtctcattcaccgcaaccttcttcttaagcacagacacctcgttttctagctcggcgacctgcgaatcgcgggctgctgtgtcttccagggtccccccggccggcgcggtgcttgaggcaacgcgggtaaattccgtattggcaggctggcggaatgccgcgagctctgcaagaccatcctcgagcatggagatggggaaagaggagtgagtaagcgcctgagaaaattgtgttggtttgcgggagtcggatggtgcgatgatctgcgtgtggaacatatattctgcggggacggcgccaggggcatgattcgcagccgaatggccactatcatggcgcggcttgacaatagtgtgggccttcctcttcaaatccgaagaaggatgagggatcccacccggaggcagcatgatcaagttagtgatcgggtgcgtgtagtcggcaactgatgatgtgtacttccgtcgagcgacattccaggaaagcaccttgccattcgcgtggcccgagagtaacgtggttccatcatatgtaagggagactgtcttcacggagcctgtttcagccgagggagggagccaccggtcctccatggacacctgcgcgggtgttgattgtaatgaaggatcgtgaagaggatgctgcgcagattggctccggtagaagtctacggattgaatgctgccgtcttcatatcccacgtagaaagcccggtcgaccgggtctagagctacagatgttgcggataagggaaggaggaaggttctcagtgcacgaccggtatgatagtcccacgcgatagcagtgttgtcctttgcggttgataccacgatgttatggcggccattgctatgtcctatagccagggaggtgatacctgcgcggtggttggagaaagttcggattggcgaattcgtgggttggcgagtcgcgctgagagcgggtttcgagaacgagagaatgccaggcaaggaccagacatgtacactggcatcggcggagccggacaggataaagttggacgtggggtcgacgacgagtgaggtcactggttgcagatgtgaggccgttgtggctacttggcgtcctgtacatgtcttaaaaagctgttagacgcatggcattaggaaatgtatcaatcagatctaacatacctcccagacaatcaatcgaccaccctcggtgcccaaaaccaatacatcaccatacttgcccccggcgacagcaatgctgcgtatccgctctggaaatgggacaatgccctcttggttacccttctcccggttgtacacgtgaatgacagccttgtctgcttgggcggcaaaaatatgcgacgggctgacagctagacaattggtcaaagttgagctcttcttgaaagtcgatcgcagtatcgatgaaggttgcaattcatggacgcagacccctacatctctgagcgaggctgtcggagctttggcggatgacagcgtcgacgccacaaatgattcagaaagcatcaggaatggaagaatgaggctgtcatacgaagtatgggaggttgggttcgaagttgtccattccttccgaggttttttttttttcttaatcgattgataacgaaatgtttgcactgtttggactataatctccggacttcaaccatccacgggccggatgtgatctatcctaaccaatttggctttctaactaatgcaatctactaaagatatccccgatctttcttcatcattagacagagcgagtgttttaaatgcatctatcgactgattgtgccgtgttgtgtatgagacccaccgggagttcgatctatcattattagtcagcgtcatataggtcaaccaagctcagctgcgccggtctatcaatcaagatgattctgtttctcaggctattcagactcaaattgcgtgcccatggtgaccagttcaagccctcatcaggcatttatatccaaccctccatgaactatgctgatatgtacaataacatcggtatgaaccagattcatgcaagggattgcctaaagttgacaagaaggggtggattgccgttgcgatgagacaccagatccaatgaagacccgctttaatacaccctctggctgatcctgttgcccttctcaagggcctgattcgccatggctcccttctcccccctcttgcatctcaaatgtctcattccaagtgcccagtcggaacccagctatgacgagctgaggcagcggatggggtctctccacgttgacgggctcccgcaggacgaaagattgagatctggagccaattgttgcccatcgttgtcctggtagctcatcttctttggaatgcaaggacgacgcgacctcattcccactattattacattggcccgtgcctaacacaacccgactgcaagtgttcgtgccaggcgacggaccctctttttatgctcgaagggggaatcgttccgttgaacattttccggctttcatggcagggttgtagtcctgtcaagggatgtgcacttgagcccgatgactacccaccttaaaattagctgactagcgccacactcgctgtataaggacatatcgagcccctgcagggactgatgcccatttgttttgacttcaacaataaacaaactggattgcaatctcatctgggtcgctcttgtgcaacacgttttgctttttttcttcgacatttcggaccaggattcttacttccagccgcgaataccattgtccagtatggactctggtgcgacagacatgcctagccatgcatggtttccggcccggatccaaacgcatataagaaatcagggctccaactcgtcctcactgagccacgatacaatggcaatggccgagccaatcccgtcaccgcgtcgatggtctcccacctatacaccccgcaggcgaagcagacagatgccctcactatcatttgtaccgtcaccagtgatgccgcgcatagagtcgcatgacttttcgaactcccaagcacggcgacccacagatcgggggccaggttgcatgtcgcctttccgctcggtccgaagaatgaaagaaccatttcaattaatgcttccgacatcaccggcgtccctcgatggccctcctcccaactttcctgaaaggccaagcaagccgtacacagcggcggcaggtcgcacattacgaacatggcgctcagaccaaaacctgaattgtggcaacctggagggatttggtcttctacctagcccgcctatatcagaatcacgccccgcaagcacgggtcctgaattatcttactttgatgcgcagtcctcggatggatcaggtcgatcaagtgacgggcaggataagtctggtaccactaaacaggaagtttctccaacggtcgcgacgcttgaaatcggagaaagaatacaatacacagcataccgtcccccagattggaagaaccaaccgcgaacagatgtcatgaatgttcacgaagcccactcagagttcgtacgccagtgcgagtccagcaatgaacgggagtcatacgtccagtctccgaaaaagagtgcaccttctatagcatccccaaagtcaatgcatagcgagagagtggtggttcccgggagctcgccaagaccacaaagaccccggactgggacagtctcgagtgaagctagttgggtgccgagtaacttctcatactgtgaaagatggctgcaaggtgttcccgttgacaagttggacgatcaaaataccactacaaaggagttcaccaatcggcgcaagtgccagattgttgagaatgatcctccaatgccaaaactggacatcatcccgggagcaaaagcccttgaagaacctgtggtaagtccaacaatctcttactgtgaggtaacactgaaagctaacccccatctagagatttgttgtcgccagcaagactaaaccgaaacttgtcgacatcgctcgacaatcgtcaccatcgcctccactaattccaccgccatgcttgctgccaaacactgtaccgacgaccccagatcagcgtcaagaggaagtatccgcatttagcccggacactcctctcgatatgtctgatagtggttatgggactcgcgactctgggttttcctttgatagctatgatgatagcaaagtggatcatgacgacgacgatgcgtataccgatccagggtcactgacctcttcggacagtgttggatcgactgtgatatgcgagaagcctggatccgcgcagggagagcgcgaaacaagcccacaaccggaaatcagatcaggcagcgtgagccccaaggcatcattcctaacaacgacccatttacccgggccgacgtctatcatctctgaaaacgaggatgaaaagccccggatatggcaccatgactggtccatggacgatcatgaatggactttagatgagctagaacactctgtcaaggattttcctcgtcatatgctccgcctcgcatcccctgtcatggtattccttcgcaaaaacgacgagaagaccctgattaaacccttccgcactatattccccgatgtcacagagaacctaatcgactgtctctgtgctgccctcctcgctcgaaactacctcctttccctgtcaaccatccaccgaaacaagccggccatcccaccgcgcaaagatgtgtacgccatcgacggcgtcccgaaaaaagcatacaccaccctaggaattcagctaccatctgggtctgcaaccaagcctaaggacccccttttcagctctcgcagcaccgagctccagggccaactcgagcggatagtggacaacctgctattcgccatctgcggccgatcagatcctactttgaaatcggccgtcgaagttctcgcccaagtccttgaaagcactgcttaacattgatcactccttgcatctaaaatttccttgcctcttttcaacctattctctctaaaacagactgaagctcatacttcgttttgacctctccttttctctgcaattcttccctgcactcttttcctcaagactcctttcctactgactgccctcattatatcctttcatatctgtgtccctaccattactcgctctaatcattgagttctctttgtccttgtctgtccacaatttccgctctctgtccatctttctactctttctactctctttctactctcttcttctcttttttttgcttttctcatacccttgcatcgcgcggtacttggaactttgacaaattcgtgcgtttgggatcaagcattagttagtctttcagtagcatagcatagcaaccataataataattggcatcgtcatcaaccagtattccaacccctagtcgtggcaacaaagtcgcccgcacgtcttttattttcaaatgacttccaatattcctccttaacaattcgaggaaaaacaagatatcgtatttattccaagtataacgtcaaggatagaccccttcccatggatactttcccgatctgatgggcggcgaaactgcttagtaatactttcccgcgggatccattgcgcagacaaactccagttcggctttcaccggttgaacttagcatacactcacacatcatggcagctccaacaagaagtctacggcatctgtcgtctttcagaaccaccatatccccggcttcgacattaattactcccatcggccgccggagctatgctacaacggactcctcatccgccacgaatacaccaggaactacacggcggaaacctacgaagttccaggataagctgaatgcaggaccttcattttcagactttgtttcaggaggccaagatgaacttcttgacccagcggaagcctacgcccttaagaccgcgcttgtcggccccgccggccgcaagaaggaaatgactcgtttgcccgaatggctgaagactcccatcccagactcaaagaatttccagcgcttaaagaaagatttgagaggattgaatctgcacaccgtctgcgaggaggcccgatgccccaacatctccgactgctggggtggcagcgacaagtcctccgccacagccacaatcatgttgatgggcgatacctgcacgcgcgggtgccgcttctgcagtgtgaagacatcccgcgcccccgctccgctcgacccgcatgaacccgaaaacaccgctgaggccatctcccgctggagcttggggtacgtggtgctgacgagtgtggaccgcgacgatctggccgacggtggcgcgcgccacttcgccgagacggttatcaaaatcaagcagaagaagccgagtatgctggtcgagtgtttgacgggtgacttccggggtgacacggagatggcgacattggtcgcgaagtctggactggacgtttatgcacacaacgttgagactgtcgaggagcttacgccctttgtccgtgaccgccgcgccacgttccagcagtctattcgtgtgcttgatgctgcgaagaaagctgttcccgatcttgtcacgaagacttcgctcatgctcggtctcggcgagaccgatgaccagctctgggatgccctccgccagctccgtgctgtcaacgtcgacgtcgtgaccttcggtcaatacatgcgccctacgaagcgccacatggctgttcatgaatacgtgactcctgatcgcttcgaaatgtggcgccagcgtgcccttgatatgggcttcttgtactgtgcctcgggccccttggtgcgaagcagttacaaggctggcgaggcgttcattgagaacgttctcaaaaagcgtcgtgctgcccctggcaccgctgagcgcactgtggataagagcgctgctatcactgacgaggctacccggtgaggtggcttgcatttgaacgaatcgattcaactactcgggaataccttttctcttgtcatctgaccacctacatgtcatttaacctcttttggcgttttctttcttgcatcttctgggttgttggtttcggggttctatagagggatgcgtcatttcaacagttcaacatttcaacacaggaattgtactttatatcaacattggaaaagtcattagtggcctatttttgtcttcctaatttcaagctatacggaaaacaacccagtgatgcttttcttatatcaaatctcaaaatgtgggcctgctccgttcctaacccactacatcccgccgccacccgccacccgccgcatataggaacagcgataaaatgcatacgctataaggtttccatactccgtactacatatgtttcatccacattggccacatgtctgctaaaggcaaggaccgacataaactccacaactctcgaacacagggaaatctccaagtccagcctggcaaccagctatgagcgccggttcaggctagacttttcgaggggtgtaatttatccaaaaaagttatatcagggcaagattcaccagcacacgtagtgtatactctactgaaaacggcgtgttgcctatttaactactcaaggacttattgcacgtcggaggtcagctccgcgatgtcctcgttgtccatgccgagcaggtagaggatatcgacaaggctctcgccgttgatgcggacgggagcttctaactggaccttggacttggcgcgccaggcgacgccgaggcctgcagtgtggagcatgaggagatcattggcgccgtcgccgacggctagggtttgcgagagggggatgccgtgctcagcggcgatggacttgagtagagagcgcttgtgctcggcgtcgacgatagggtaggacggcaccaatttgccggtcagggtttgggtggcctcgtcgatttcgagctagatgaattgtcaggtcggatgaaatagagatagtaggaaacaggagaggcttacgtggttagcaatggcaatgtcgataccgagctgctcggcgagccatgcggccaggggctggaacccgccgctcaccactgcgatcgtgaagcccagagtcttcaatgcgcggcagagctcacgggcgcccttggcgattgtcaggatagacttgagcttctcgaagacgtctgcggagacgccgttgagaagactgacgcgttccttcagtgacgcggtgaaatctagttcgccgttcatggcgcgttcagtgattgcctgcggtggtgttagtcgctggcatagagaattgaagtatgtcaagaaggacttacggaaacctccttctcgacaccaataaatttggcaatttcgtcaatgcactcattttcaatcaaggtgctatccatgtcaaacactgccaggcgcttgtgtcgacggaagacggtctccttttgcagaacaacctcgacgttccactcgcgctcaaagcgccagatgctttcatgcttgcgcagatccgggaaggaaagatagtccgggtttggcggaggagagaatgtgacctccacgacgcgggggtgttcgtcgcggtcaagacagcggtgcgaggtgttcatgcgctgatagggcgtggggagggtttccaagatctgaaggaagttggtcaggcacagctgagagacgtatggcccgtacaggtgatccagtggctccggctctagggcaggcggctcccgtgggaatttgtccatgtcttgtgtcggggcagagcctttgggcacctcgggagctgggatcttgtcgcctggactattctggggccctaaatcggggtggtagtgggggtgaatggggtggtttgatttgtagtagatggtcgcgacgatttgcgacgtgccggttggaagagggttttcttggtggttgaagatgctatgaatgataccgctgtcggtgaccctatccggatctggcttgattggattcgagctaagtatcagacgatcgttcacctggttagccagaacctcgccgatggtttgactgattggagtgattggtgccatcggtttgtactgctggtggtcctgcaggaatgaactgctgcgcatttggccgagggacggcctggtacgggtagaatctgccataatgtactactagtgaagcgatccggtacagagttattcgcgagtggaagctatcttgacagatcccacacttccgaagtcaaaaacgacttgcgccggatcggcacgtgggactcggtcccaccaacacacacgtgactgctgttcccctctcacgtgagctaccgcttggcagaataattgtcaatgaggtgatagaaatggaccacctccaggaataagatgagctcaattttgggtataagcaccccgtcagatccaccatgacttcaggatatgacctcagagtcagatctatctatttatggatataatatactgcccaaaatacgtactccatactccgtacatactataatcacgattctcctaactatgcggtatgcccagattattggcgattaagaaacctgctaacatgatatgattaggaagatcaaacccttggaagaatacttccagtaataggtatcatcgactgggttggtcatcgtcaattaccaatatccgggaggttacctccatggcttcccgaggtcgttggaatcaataagcaaccatctacgccattctatagaacatgggcagaaccatctccgatatcgtgggtctggccatacaacgtctcccatggcgccaccgccttcagagaatgaccctctcttccatataggaaggcggtgagatcaaaatattcgagcacgcaatcgatggcgatggcgtgcttggggtcttttcagtccccactctgtccattggccaatggcatccatggaggtttgaaatgaagaatagccgatgaagactatgttagggacggatctccggatgatgtgattgcccctgctgttcttatattctcgtctctcattgtcatctgtgactttgttcttcttactctcctacctctccgcacattcaattctattttcaaccatccattcactaccaacgtcatcacagtgccatcccatcttacattatgcccgctaagatgcccaccaactactcctctgagatggagggcattgacaaccatgataacatgactgagtctggttatgtcagtgctggttcaggttctagcgaggactatgtccccgagattgtcttcaccaagccccatcttcagttcctcaaccgccagttgcagttcctcgagccccaaggttcgtactgatatccattgacccctctttctgacgacccttcatctgactcctccttacagagatcttgagatggtgcattacctcacttcctcatctcttccagaccactgcctttggtctcacaggtctcgtcaccttggacatgttgtcgaagctggaggtgcctcgtccccagatggttgatctcatcttcctcgacactctttatcacttcgatgaaaccatggccctggtcgaccgtgtgcgtcgcaagtaccccaacaacaatgtgcacatctacaagcccgctggcgtcgacactactgccgaattcgaagccaagtacggtgccaagctctgggaagtcgacgaccaactctacgactgggtcgccaaggttgagcctgctcaacgtgcctaccgtgagatgaatgtccacgccgttctcactggtcgccgtcgcagccaaggcggcaagcgtggtgacctcgacatcatcgaagtcgacgaggccggcctcatcaagatcaacccaatggccaactggtcctttgctcaggtcaagcagtacgtgcaggagaacgatgtgccctacaacgagctccttgaccgtggttacaagagcattggtgactggcactccacccagcccgttgccgatggagaggacgagcgcgctggtcgctggaagggacagcagaagactgagtgtggtatccacaaccctcggtccaagtacgcccagtacttgatggagatggagcgcaagcgtcaagaggaggctctctcgcaggctttgcacacccagttgactcctgtttgatctgtccttttgaatccttcggctgcatacccttcggcgttctacgtgatacctctccgttttttttctccctgttctttaagcggctttatttttccccagaggcggtacaaaagtactctttgcatttacatcctccctgcacagggagttgagtttagttctcgggcccactatgggaattgtttttgagacatgataatgatattcatatgatgacagaaataaaaaatgaatatttctcattaatctttactctccatctaaatagttacatgtaatcttataatagcctcaaaatccttggatctttgatttgtgtggcggtcacgtgcggtgccaaccctagtttaccctgcatcacggtatcatttctgatccacacaagagactcaaatcttaatttcgaagagttatttatctttcaaatatctagaagattgacatgatgagataaagtagaaactatggccttcaccatcaaagcctgtgacatcgggcgaatatcgtaaagacatattaagagaaaaaaagggtgaggagtttcgaaaaccaatcaatagcacgcattctcggccatgagcctcagagttcgcggcttgacactccctcgcgcaatacgagacttgcacgtacctcgaacacggatgcaggggcttatgtaaaaccacaattcagacagctcatctcaacatatcgacaccatcatccgggagatcatacaaggccattgcatccaccaaagctcgcctcggcactgcgaagctcttccgcggtagtgacagcaacctcacacagatcagatctgacgccaattacccgacatctacgggacacagcctgcgcaaggctctcgtcagtggtgctctaagtaaacggcgcgaatggttccatattgctgcccatctggggggattatgccctgctcgtcgaacatgttgacgaatgcctctagtagcaaagggacgataattttagcctgctcgtctggtgagagaggggagattctggatcggccctcgcaatcgtcgtagttgttgtatggattcgcgaagtcggaagaatacggcttcgcctgggacgccggggagagcctttacggcgaaatggtagtggttgcgtctgccggatgcatcccgctccgggcgctggagggcattgaaactctataattgtgaggcggtagcactttccattgttgtgatgatttatggggaaaggaagggatgttttgagttttccttattacgttcaattagccttggatgatctacgggtggaaaagcttggcatcccggggacgaaatgccttaattcatacttttcttccctctttcggctatgctatcttcacgctgcaatccccgcaggactatcagaaagcccagcttcttatcagtacacttcatcgttaacaagtgcttcaaaaactggtccattggaatgacccctaaatgttcgcagctccgccggtctgggcatctcagagcttgatgattatattttacttgacaagagctagtctcagttgctaaaggctttcgtgatactatggctacaactgcatgtagcatattgaaccattcttcgacttctctcacattactctcacttacgaagaccccaccttcgactccagacgccgttaaccatatagaagaccctctccatattttcttcttccccattcaccccatcttcactggagatttccttcatccatcttccgatgttggatatggtgatctccacaattccacgagaacaaaacccaaaaagtaaggggaaaaccgacggagagaactagacaagcaaacttcgacgctgtcgcttcctcagcgacggcgacagatgagatagtgtacgacttcagcggaatgacaatcgcaaacgacgacggcgacaacgaaagaagatttgccgggtcagcgactctctcaaacgaaccgacacgtcgactttgtgcagggattacctctagtcggttaggcggtatttagaggcatgtcttatccatgaaggcaacgtgggggaaagggaatggccctattcgctctcttacggcaaatatcagcaaataggctaggaaacatttatcgttaaaccagttatggtttcgaagattgagcttatatgctttaaacttaatactggcgttttatcctagtaatcactatatctaatcggggtaatgagtttaggcctaggttacattatagggaacgacggagtgaattgaaaacacctgactgtaccggatgggatgaatcaaaattatcattacagaaaggctacggagatgtcttggaatttgcttatcccaatgtggttacaacttacattcgagtgatgtcctcaatcttgacaggggtacgtgtcaggcgctagtcctaggccaatcattgggtccgaagatgaggttagcttgaggacgtgtttgttaagtgtaagccacctactccgtcttctcatctctactatcacccccaaaatagatgtcttaagctgaagtttgtcgaaggtattgtgaaactgttgagagcccgagagaagaaacaatagcggcttcctctcctggggcaatttcacccctgaggatcagcctgagatttccaacttctcaaaaacatggaaaactgcacctacttatagttctatgtcatcttcgaaataatcaaagaggatttgagaagcgactcagtatcgaaagactgttgaaagatcagcaaggttatcagaaattccttgcattgctatcatagggccgacgccacgatgaaagggaaacttgatggcacggcgctcgatgcgatcaaacaaggccacacagagattatggggatgctaactaagaaaggcgccgtggcttgatctagcacgcgaatcaacaagccaaatcaaactgatgcatggctgtttcgtggagacgacatgagacagactgttctatccctcaagtgctgcgactatcctttccaaagccaaggtcaaaaattcatggccctgtgtaaacacaagtcgaaaccatccatccttctcagatccaaaaagaaaaccgctggccaaaaagaccttcttttgcaaaaggtgctgcataacttgttcgccaacgttctcgcactcagtttccgggtgaagctcgcggtatctctttcccaggttcatccagacgaagaacgcagcattgcatcctgtcgcatattcaattccgtggtctttcaggtagttcgctgtgtacgcataggattccgacagcagcttctgattttgttgaatataccggtcggtgaaatcgaagtcttcaagcagaagagaagtcaggtgatccgtgatcccagaagcaaaagaatagagcgatgggcccgtcatcgccatatggaaatcacggttggcctgggaaatgatgacaccgagtcggataccgttcgcgccaaaatctttgctcataccccagaggacatgaaccaaacgggggtcgataatgccagtcagatcgatggaaagggcggattcgaatttgacaggtggtggatatttgtcgacggtattctcaaagaccgaaagcgcatagatttcatcgctgacgaaatggatctggtatttctgacagagccgcatcagcttgacgagcacttctttgggatagcagcgtccaagcgggttgtgcggatgcgcaagcatcaaagccttgactttcttaccagttgttcggtgaaactccagcaatgcttcttcatacttatccacgctttcgatgctgagagggtcgtgttctccgaaactgacaggaaccacgggactacgcgaacgcagtgagatgtcggggatgaacatgccgtagtacggtcttcctagaaggatgccctcgccgggatctgcgaatgaccatgcaacatgctcgaccgcagacgagacaccgttggtggctatgacgtggctcggctcgagtggcttgactggcttcagatggcggtccaagaatgcggcgatggctgccttcaatctggaagagccagatccgccatcgttgtaggtgaggtacttggctggcagctcgagcttcttgttgatgaatttgaggagctcgtcgtgcattagtgtgttttcggctacgcccacgttgacataaccgttggggtttgttgacgcgtcccacgcgtccttcatcacgtcccacatggggttatcggatccggcatcgacgacatcttgtgcccgacgggagagaaccgattgggccattttagaggtcgcgaaagagttttcacagagatgaagtacgaggaagtacgaggccaaatgagtgagtgaagagaatgagttggaagaaattggtcgcgaggcaggtccttagatatcggttactaacggctgccgcaaatggcaagtctgggttatctccatgcggacagagatatgaactgtcatatccgaagggcgtgggcggtgacaggtaaagatatcatctagggcatttcagccttctatattgatcttcacaacaggaaggcatgaatactctagtttatttttctagaacaaccttatcaaacccattcccgaggtccaatagtttttgcctttcttgacgtcaaatgccaagcttcgacgtgaagatatcatcatccccacatcaaaagccgaacaccgaactacagtccatgaatatttcgagaaagacgacaattgacgctgatattaagattgaaatatgcatctcaaattcctaatcaagcgcagacaacacagaattcaagcccattctatctgttagcattgattgcccagcacgacgctctagcccccgtacagcaaacccctcgaaacccaaggagtattgctcaatcagaagtatgtatcacacgtcttcaaaattttaaagtaacctccacagcacagttgagcacgacatactgaggcgtcaaattcacgccactggagtgacggtaggcaggcatctgcggatacaccgaaggatccaagggctcagattcaatttccctaatattcacgatatgcataggtgtaacatgcccacagggaacagctctcgcatactgatttaccttcgtgacagcatcgcacacagcctccttgcacgacttgacaccgatctcacgcctggtagcatcggtgaggtaccagctgatattgttcaatctagcgttggaatagcaatccagctcatcaacaaacatgcgcagctcgtcgaagtcaaggaatatagggttggtcttgacggtggcgcacacgtgggatttatcaatattgtttctttcaggccgttgaaggtcttggtgacttctttcgagaccgttgcttctgactcgcctgttgattatatggtcaggtggactgtggctcgctctgggaagcgacgtgcggtggaacgacctcgtagagtgatatggaggggcatggtcggtttgggatcaggaaccaaagtggacgatgatgaagatgatagaattaggaatttgggggtttaaatggccctcgggataccagacggtggaaaaaacattggggacttttatacagtctcaaaagtttgaattgattcttctcgaatacaaaccaattcttatcaatttacttagctttcaatgtcaaatgctaactataatcaagaccactcaaccaagcaattgctcctgcttagcgccctcaacagcaacgagataagccggacgatccttgacatagaactcgacgtcaacctttcccttaaaattagcctctccaccgtctagggtcccagccttgatgcaagtcatatcgggcatgatctctagttctgtgtagagactcgagccgcaggttgggcagaaaaagtgcttgttgatctttccactggttccgatcccatcgtaggaattgggggtacctatgcagaaagaaatgtggagtcagcaactgacaagcggattgtgggtgtgattgtgatcgcggtgcgaggtgtagatgtagttaccctttgtcactttgaagctggcgcggggaaccactgcgttggaggtaaatgcaccgccagaccactatttggtattagatgttatggtcaacgcccatcggcatatatgtataagtcttgggtttcaccttctggcagtcggtgcagtggcacagggcggacacatacgtgtcggctaggatgttgttagctttggatgtggtttcgatcaattgatataccttcaacggtgtaagcaatactgccgcacatgcagcttccagttaaagtcatgttggatgcaggatatacttagtatgcgtgacgaaacaccttggtggaatcgaagtgcaaaaagcggggttggtggcggctttaatactcggagtccttctggggtcttctccgatcgcgggtttaaccctcaatcaggtaaatggtcggtttactgcttaatagtctagaaaggcaggaatcgatataggcaggcagaaaaagattggcatcattcctagaaacaagaacctgctttatatacatcatccaagagtcaaaagcagtcaaaagggactcgacaccaggtctctactaaaacgcaagattaaaaaatcagaagataagaaataaatgaaggtaaagatgagacaagacagcaatggtgtatatcactttagatccacgcgagaaacatcactgaaaagggataagacagaaggaaaatggcgagaaatgaaggaatgacaaaaccggggtatagagaggatacataactgcaagcttgatcgaactagaaacgaagacattcaaatgcccccggggcaaaaggtgttatggggtattgagaaagtgagattgtatgtccacaaggacagtctcttggtcaaaatgccagcactttacagtatgggaacaactccccaaggagagccaagtttcatcaggttctcggctttttatatgcaccttcccctgcggatccatcgtctggggattttctcttcttatcttgttcgtcttctcgagagaagccgggaccgctttgtactgccggagtcgggaaggtgaggggactgggcagcatgttggaatctgggcctgaccggccaaagccccattcggggaagaagctggaaggcgacgggaggagtgcatcggatacaaagcgactcggcaaggcggatatgggcgtttcgatattattcgagttattcccattgttcgggtttccgctgctgctgctgtaagagtcgtttcgcgaggttgaaacaggaggaggcgggcgcgcgaacggatttggaggcccctgggctcccgcactcagtattgcaccagcggatggcgacggagggggtaagaccacgcccgggggtccattttcggcacttcctttcacaggcgtggaggttctattcccagcggaatcgcgtgacgagtcggccgtggcactgccaccatcggaggtttcgctgggaatctgcactttcaactgtggtcgttttgatggcaacggtccactgttagttcgggatggtggtttaattctttgcgttgaagcaactggccctgcacgaggagtttccgtggcagctctgacaggcattgacttggtaccaagggaagcttgtgggtcgaccttgagagagtggttattgtgagactcatatgaccccgctccagctccaaagtggcgggcgagcacagaatctcgatcatcaataggggtgaagatactccgtgattttgataacgacttcatttgaggtggcgactggctgtgctctggtttcattgctcccgaagaatcatcttggggatgctccgaggcaggccgttcttggtgaccatcaggcgcgaaccctggaggcatcgaatttctcccatgttccggcatatatgcttgcatatgctggtggggccccggaggcattcctgcatggccgtgctgttggaaatgctgttgggcctgatgctgttggctctggtgctgtgcctgctgctgtgcctgctgctgtgcctgctgctgtgcctgttgctgcgcctgctgttgcgcctgatgttgagcctgctgctgcgcctggtgctgtgcctgttgttgtgcctgttgttgtgcctgatgctgttgtgcctggtgctgtgcttggtgctgttggctctggtgttggccctggtgctgtggcggcatttgctgtggcggtaaaccatgcgggtgcataggaggcgtcccttggtgttgtcccggtgggtggccgtagtgcgcaaactgtcccggtcgaggttgttggttcattacatgaacattcgggttgtacatggacggattgggcatgtacgtgaacccgccattttgggggccagggggtgctggcgggggaggtgtcccatgttgctgggggcctagatttgaactgactcgacggatatgatttcttgaagagggacgggaagtgccttgcggttgcggggtgccatgacgggtcatggcatgatggatcgggggtgacgcggagggtgcatggttcatgtgctggaaggcgggctggttttggaggtgagggggaatagcggggtggttctgaactgcttggatctcgtcgggagccggcgaggcctcatattcctcgtcatcgtcatctcgcttacccgcgaaatcttccggacctttatgctcgtggggaggaccgaactatgacgattagttagagattgtcgggatgaatcgaagagacatctacccacatattgatagcgaccaagagcctcgtgcatgtcgcatgatgagtactcgtataatttcttgttgtggccaaatataatgacagctacgtcgacggagcaaaggacagcaagctcatgagccttcttgaacagacccccctttcgttttaggaacgtgctatagccgaagaagctttgatcagcgactggaacggctgactgggatgattaacttacactgagcggttgcggtcatctttgatggccttgatctcaatcttcctgcgacccatgatggatggctagggtgcaccaattgcgcaccggtagcaagattgagaatgaaggtacaagcagccgcggggcgacttgcgagatacctcgcgactatatttaattacccaagatacagaatcgacgcgatggcgattctagccggtgccgcacggggtggatgtgtacgtgaagaatctcggtttcttccgaatgagaagatccgaagaacggtgtggctagtcaacaaagggatctgaaaccagaaaccagtttgttttccatgtaagaaaccctgtagatactggaagagggggtatggacgcgacttgaaaacacccccccgaagttcaaaaagaagttgaacccgaggagacggaagggtaggaaacaaaggaacaaataaaaagacaaacacgaagtaaatgatggaagctgcggagaaaggatgattgacgatgcaggaaaggttgattctaaagatagaatcgagggagagggagcccgagaagatttcctggctgactcatcagggccttaggcgccgggttctatatttatcttttggcagtcgcagcgcgaatatgtcgactgagcacacggtaactcgttgtagttagtgctgtccctgtggcttgtgacagtggagtcttgtccttaggatcctattggcaagacaagttgctgtgatagtattcttcgctctcagcttggatgggtctaccgtctatgctatgatgtcaacccggggaagctcaagctcaatatatacaacagatatataatgacatagtagtggaataatgatctacagaatatcatatttacattttcaggctatctccataggttatttaccccgtagcatagcttatttatgtccccgtgatatcgccaaccctatctccctacaatatataaagagagccagatcttattctcaagtaaacgtcaaagtaaacattcagggttacatatgtatatgtagaagtatatgtaggagtatatgtcaagtatgttcctacatcccccactgattggtccatgacatattgggcagatatacgctgaagacatatcgacacgtctaatgaccgtcctccaatagaacatgtcaatagccatacacaaccttggatccccgaaacccagatcaaacagataatcattgtatcatttctttttatccttcaaagttcccaaaatttaaatcgaaaatcttctttgtgtggcagctgggcatctaacgcagtcgagactcgcgggtaagtttagtttggtagtttggtttctgatttacccctgagcttgtgaatcgcttcgttttttttttcccttctctcccaacactttgctttcttccgctcttttcctttcctctcctttttcttttcttgaggtctcttgcgcggtttccactctgagaagcacagacaaataagatcctaaacgagggattcttttactttgtcctgctgttaccggggctgcaggacatcccggacacgcctagacgttttaactattcgctcggtcgaattgccgtgtcggttatctgcattgtggtcttttgaaatctctactaatctgttgtcgattaacagaagtcccaaaaaagcggacccttaatctctccccacagtccgttttctgacgcgcaaattcaattgccagtggccgaccatccgacatgtccttcctttctcgggtgtttcggggcaaggactccactgcgacgaagaagcaggctaaacctaccgcggcgctcaacacgggccctgcgaagcctaaatggaccgatgcgtggcagcggacagaggtcgccccagaagaggtccaagacctggtacgagggtgcgtgcatgagctcaaggcccgaggtaagtggtggatttccaactcgaccgtgagatacggacatggcatggtgcgtcggattgctgatcattcgtcgctgcagctcttcacacgccattcctcctcctaccgttccgtcctagctccgaccccagcgcagctcgcacgttcattcgcaattactttaatcagtctttcgaaaagggatcgcccgtgaacggaaatgatttgtcgcaggagctccggctcacggagccgatggtgagggataatgttttcccagggattatcagggggtcgctaatctcattcctatgaataggtcctttgcggtgtgatgaaatggtgctggagcagactccctggcggtgttgtcacttgggaggcgtacgaaaccttcaagatgggcgaaaatggtatgcgatattctttggaatgcggggaacatacgcgctgatgcaacattagattcggatatggcccgcgacgctttctcaactttcattccgatcggcggcgactccgatgcacgcaccagtattattctggacttcttcgatcttttggctgccattgcggcccatggaaaatccaatggcttgggaggtcgcaagctttcccgatacgctggctggtgggcgtttgagcatgtcgatacaggcaatggcttcgaggccgcctataagaactgggctgtgtatggacttcattaatccgatgtttcggatggtattctaacaatctctagtgctgccgatgctaccagtcacttgttcttcgcctaccttcgttcgttgtctcccgatgtccctcgcggcgtgagcggcatctcatcgctgccaatttctctccaatcactcgttgaagcgactgaatatcctcccgaaaccccgacattgttgcaagttacgactacaaaggtgattatgattgtggagaatgtctccccgaccccattctccttgttgcgacgcgcaaagaactttgaataccgcgacgacgactggcacctgcaggaatttgccaactacgaagacccagtcgatgcattgaccgacgagtgtctccgtgttcttagatgtatctcatctacgaatcaatccagcgtctcgagtgccaagcagtcaaccagtttacgggatgcatcttggtctcgcttcgaggatattgggttcggtggttcgattgactctgacccggaggacgaagccaacgagactgcttcgccggcgactgcaaggggtggatctgcagcgggcttgagctccgttcctcaatctggaactggggactttggccgtccgaccaccccgtcgtgggcagacttcatgtcatccggattcccggatgaaaacaaattgaaggaccacgtgggccctctgctcctgacccctgacaagttcctgcccccccttgcctctgcgcgtggcatgagttctcagtcgcacaagcgctccttggatatcgagccggctctcgagcctgcggagttggcgagtatcacctccctagacatggacgattcgttctggtgggtttggatcagcagtttatctggcgatgagccgtccgcacgcaaggctgtgtttggtcgatgcgctctcctggagaccaaaatccgggataccaaatggctgatcctcgaagagcagatcaagggtgctgctccagagcctgaggccggtgctcagattgtcgaaaagaagcgattcttcagctttggcagccgcaggggaaagctcaatcgccgcaagtcgttggcgaagaaggtgccttctattgaagactcatacaagcgacccaacaatcagggaacgcaaagcaagactagcatcggaccggatcagcacaagcggatccaggaagctgcggccgctctgcaaaagaagcaccgcgagcaagaagcggaggcgaaagagaaccgtgcaatccctaacgataaccgttactccaagaccaactccatcatgacccttcagcctgccattgtgagcgaggcctcccaggccatgaagtggactaagaattacgataagggtgccttcagggcagcatatctcaatgacaaccgcgctggcactggtgaagaacccgaggacaaacccgaggacaaacccgagccgatttcgaaggacaccgaggagaagtctaccgcgccattggcacctcttccaaccagcacctcaaagagtgttcccccaccacttcccaaagaagcagcagcagctgctgtgtccactcctcttcccccttctcctagggaggcgccaactaaagctgttaatgtcgctactcccgaagagaagaagcccgtcgcaaagcctgccgttgttgaacaacctactgagcgtcgggaatctgtggacgaggggggcaagaagctgaagaagaagactggcaattccggctttaagagcatgtttagtgccaaaaagaagcccgaacagcaacagcctctcgtgaagaccgctaattccaaggaaatttccactgtggcagctactcgtgcggccctcgaggccaaggcgaaagcagctcaggagtccggtcccatgaaaaagaagcctctcccgagtaccgcgtccgtggctaaattgcaaaagccctcgcctcagcgtgttcaaccgaccgccaaggaaccagtggcaaacccctcaagcccggctcaagcctccgcttctctggaacagaacggtgagccgccgaagaccagacgcgccattgagtatgatgctctctcgcgcgttgctacccacgaacttaaagcagccgatcaggagttctccaagtttgaccagggccccctggctgaccagcctgctttcgtccccggagattctcccatcacacctgtagctcaaaagtccgaggttccccagagcccgtccaacggcaatggtgttcgccatgaggtcgccagttcgcccgagtcacctgaagctacacatgatcgctggaaggcgatccgtgaggctgctgctcagcggactgctgcccaagaggaacaggtgcacgaccacgataccgaggccaacacccggactagccagtccgagcgcactgacgagggagataccagtggagaagagagttagtaacttcatccccaatactgaccacacactaacagttctttcacagccatcgaggcccgtgtcgcccgcatcaaggcccgagttgctgagttgaccggcaacgcggaggatggtcaaaagcgctagcctgcgacgttcccggacctgttttcttttgtttattatccctgccatttccccctggctctctattcagtatgatccaggatgtatcttttgttaatcgtatacccttctcccgaccagacattggtcgtgtttgctttgagcgcggtctgatgaccgaccaaggtcaccatttccatatcctggagattagcagactgacgaatactgcgatacgattgatggattctttatttggttgcgacatctgtttattttttctttgatttcttgcctcttctccgtcaatatttgattcgagtggacaaatatcctcctgccttggcttatttcttttccccacctatcgaatttgggctgcttttttgtctgtcacttgctctattcccctttcgctactgctattgattctggttcgctgccaatatgaatcgctttgtgcctttaagttgaagtactatcaatgtaatatggaactcttacttattccaagcatacaatcaaaccagactaattcactaatgggaaataacatacaatatagacctgctactgatctcaatcttaatcatatactagatactaatcctaaacccgaactacaaccccaaagccttcagaatcgccttcccaacccccgtcgccgacgccggattctgccccgtaataatcgtcgaccccgtcccagccgccttcccaataacaatcatctcctcccaaggcttcgcagctttcacatacttcccaccagtaacccggcccagctccgtctccagcataaacggcatagcagacgacagacccaccgcatcctcctcgttattcgagaacccagtcacgccaacgccagagataagcggcacgccggagggcgctgtggcatttagcaggacgcaggggccgtggcagacggcggcaacgggcttattggctgcagcgaaggcctggattagagcgagcgaggtggggttttcggttaggtcgaacattgctggtgtgtatatcgttagaggatgttatttgtatcgatgggatgatacaagtatagctaggagctgaagaaggagggagtagaggtatgggtatgggtaactcacgtccatgaccgccgacgtagaaaatggcatcgaactcgccggcgcgcggaagtacatcggctagcttttccgtgttcgtccagagagctttttgttctttcaggaacttctgcgatatcgggtctgactcgcacatctttatcgaggctgggcttaggggtgcttcgccgccttttggtgaggcgaccgttagggagaccttgtcgcggaggacttcgtagggatgggcgaactcggactttgggatggtatggttagtaaagggttcattgtaggattggtttattggtgagatggaatggaacatgtatgtatttaatttgattgaagctggaattggtgttgcatactagaaaccagccgtttggcttgccggtggtgccgagcttgtcttctgaggtgaggacgacgaggactttgggtgtcattttgggtgagttgttgattggtcgtataaatgaaatagtagggacaagttgattgtgttcaatattttcattttcaagtcggactgagggcgaagggtggctctgggtctttctatatgatcagcatcactgtacaatgtacattatgtatgtatcactatcccgtcattgactccacaaaggtcaataaattgttacatgagccaatgagatttgttagaagaagctctccactgcagaagatgtgcagctcccgatgtcaattatatgatgatgtcatagctcacatgctcaagtctcctgatgtccattcaaagaactgatatattaggagtcactatggtgtaggctgggtttatctagtcgcacagcataaacgcatagacatgagccctaaggtaaggtacatacgctgtacctaggtagttactagatatcgtaaacttggtatttggatattgaaaaaaaaaaagaaaaagaaagcatcagcccaggcgagcacagcctagcgattcttacgcgcagcggtgttcatgccgatgttctggttgctgtccaggatgctcgcagactagcgcttcttttcttcctcgatatttttgagacccttctcggtcttcatcttttcccggccttggtgtgaaactggtgactgagttatctgaaggcttccttttagttcatattgcgaccaaacttatatatataccacagttggacatcgggcttgagttcatggttgaacacatcggccatattgtgacgatctgacctcctacgtacgtgccggacgtgcctgcgccagctgtaccttccgtttctgatagaactgctccttcctcgattggaagtgaacctaaccgagcttccgtcattacagctcgtacaaaccccggttaaagtaactcgtagatagtttttctttcctttctctctctatactttgtaacttgagaaaaatgcactcattcttctgaatcgaactggcttgtaacacatattatgtacttcgtgctggtcacactgcttatataggcggggcgatagaagaaagagtaagggatctatggggacgtgattattcttatactcctattctcccagcgcgcgtgctcctcacgctaaggtagaaaggtgctacagtaaagattatatgaatataagagcataggtaccgcacgctgccacgcagtgctgtggtttttgtcagattgtgatacaagaaacccgtatgcagttcattatagagtgaataacatctgataccctgtcatcctatgctgtaggtgcggatagtggggcgaacagagctgtggaccaatgaaacatcatgaatggggatatgtaaaaaatgtataattatgtaatgatacatgtatagttaactagttatccaggatgtattagataccgattacggaagctaagccgattggtagagataagataaagacggatcacgtgattgatagggacagccaaactccggggaagactaaactccattttgtacgacaatgcataaggtgacatatcaaaaatgtccgaatcaccacggaaaatcagctccaaacgcgaccgccctaaagtacctttagatcaacgcaaacgcattgtcaaagcctgcacccaatgccgcctacgtaagcgtcgatgcacactgcagtcgcccgagggatgctggaattgcaggaaaagcagtgtgacttgcatttttgagacgagggaggacagcccagccgaatcaccatctaggtagcccatgagacacggacttccctttatttgatgcaatctaattcgcacagtcaaactcacatcgatgacgatgttgtagcacggttcaataaatcatatccgggggtcggtctcaagtcccaccatatatcttttcttttcgagatattcaaagacttgaaccaaggctctagagatcgctcttcgaagcggagaagtccattttggcatactagacccccaccacagcatggaactagacctatgtctgtggagcgtcacccaaatgaagggcaactgcctggtagggcgagattcagccgcagatgtgtacttgctccgactgacaacttcactgaaggtgacgatatactgtcacacagacattttctcgcacgtgctgctgctgcagtctcccagtctgacagactggatcttccagaggataccgtatgttacatgaaaacttcatattgggctcttctgactgttgccgacttaattctcaatcagaatttctatcccacagacgaatcatattgtgagaatgaaatcatcctcagacagcagatcttgaaagatttcccctctcgagccggggccgaagttctcatggcatcatttttctcctatgccgaggccaactggtactatttcgacgaaagctcgtttagaaagcagctgtttgaactatatgacagtgacctatcaccgacctaccctagtctcaaattcatttgtttggctctaactgtcttcgccatgggcagccagttcgttcatctataccatgctgacaattcgattgccttggaagccatgactgtggttcaggcaggaatcccagggacgcggtacttccaacatgcgcagaaacttgtgccgcagataatagcttctccttctctggaaggcctgctgagctgtctactactcgccttgtatgtactgccgattcatagcactgaaacttgttacacatatcttgggcttgctttgcgcatcgcaatcagcctcggtcttcatcgaaaatcaacaaattcggcattatctccgtcactttcggagctccacaaccgtgtgttctggactacctacagcattgaacggtatggctttctgtatcaccttgattcttatctttctcttaataatatcccagaatggttgctctctctcttggctatcccgagacgcttcaaaccaaagatatcgactgcctccttccccatcgacagcctgacctggatgttccgggctcctatagagccgagagactactggcaaatacaaggttgactctgctgctcaacgaagtgatttgcttaaggtaagaagcctattgtaatctagataaaggaagctagacaacatccccagctggcatgctaaccctcaatagatccttgaagcacggttcgaccgaggatatccgaagtcaacttttggcttggaaggcagacctacccgctcaattagccacattggacgataactgtttacgactgaacgtgcatttacaactccactactctatgatctggatctatatcggtcgcgcagccctgatcgacaaagtgcgacgcttactcagcaagaaagagcccacaaaagatgaccttgacatagcgggcgacagtcaagaattatcagacgcttgtgcagaacacgcagcgcggataatcgatctcattgatctgctcagaagtcgcgggcaactgagtctattctcttacactgatttccatacctgcagctccgcaaccatcatcgttctcctggatagtatcctgaacccacgaatgtcctcgtttccgacagtccggaccgcaatgggcgctctgcaatatatggctactggcagtgatttggccagaaatagcctcaagtatgtccacaatttccaaaacgtggtcaacaaagccttggcgtctatttcctgtttggataatgggaaatctcgccctgagggagagactggcccacttccgcttggggagccacgtgaagagacgtttaccgaaggattggacatgtaccagcatgaaggcgaagagcctaacctggccctattttctgacatagggattgcactcgaagactgttcatttacagagctacatcttcttgggcttgacagcctatactcgagtgatgtacaaaattggaacggcagttagaaataaatccacgtcttcttttccacttcaatctcaacagaatattctgtcctccttgattatccttttgcttctttcaaatttgtcaaaatgctatttgatgcacgtaggtgtctgcgtggccgaaagaaaagagagatcaacagcagtggggtaatatgataatgatttaactactagtaaatagcttcatggagacaaagtaaatagcttcatggagacaaagaacaaagcaacaaggcctaaaagccacaaagggcaaagaaagttttgacaagctgcttataaacaattccccaccgcatcaacacatcacattaaatcaaaggttataccggaaattcttgtcttccttgtctgtcaagtcctttccagtgacctcctccgcgtactcgaagatatccatccccattgtagaccgacgtttattgtcacgagcacacgtgaaccaatacactccgacggtcggaatgaacacaagccagctaaccagagccaagacgagaccactgcgataccggggtgcatttttcgtgttccagagtaatggtccaactatagcaccgatagcgtagccaacgaagaacaaagcgttgacgatggcctttttggtatttccacgaatattggaagcgtttagactgaggatgaccgttaagatgtttgagatgacggaggcctttgtaaaacaagaattagcaaaattcagtacaagtacgagggtgtaggttcagccaatttacataccaaccacgatgcaacaatcataccccatcccgaggacaagggaagcgtgaatagtagaatgattccgacgagcgggatgattgtaagcccgatggtgatcgcacatcgacgattcggccaaatatagcagagacctattccgacccaaataaagaccatctgaactgcacctgctggtgaagtgtatagcatggtatcgaaatttgtgtagcccaaagagtagatgataagggaagcgaactgtcaccggagtatagtcagtaattgcacacatgtcttcttgtaagagaatacgcgacttactgcaatgactggcgaaggtagtgtgatgagaagcccaaataggaaactcaaatacgctctgatatccatagctgtctctttcaattgtgagatagagaaagttgtctggtctcctccttcggtttccgctcgcaatcgttgtgttgctacctgtcgctcttcgggggtgaggaaccacgctgagtcgggaccagcgggcatcaagaagaagaataggattccaaagaagactgtgagagctccacagatgatgaacatcgctttccattgggcaatggccaatgccgtgttgtgaccgataccatacatcattagagcaccgatgacctgagccagcccgttgcagctgatccatagactagtttgagaatttgatggttagatagagaaaaggtagattgggggttattagggatgtcctacccgatgcgcatgggatgctcgcttttcttataccagagactggtgagcgtcacaaaggcaggcgagaccgcaccttcagccaatccaagggcgaatcgaacacccatgaaagatgagaaggttgttgctcctgccagacactatcttgatatcagtatgtcttcaaacaaaatgttggtgactgggtaaattaccatgcaaactccaccccagagtatactatactcagtcagatttcccgaataatcttgatgaaattgctcgaaactcacataagacaggatacaaatttggcaagcggaagacgactcatcaagtagatggccgggaattccgacgccagctgcccaacgtagaagatggaccctagccaggcgaactgtgtgcccacaaggtgtaggtcatctatcaatccgaacacaccagcgtaacttagactctgcttgtcaaggtctagatgcgggatattagcggtatccaaaagcaagaggaaccaaaacatgaatcaacttacactgagagaagtaaatcaagcacatcttcaagcctctcacgatcagcacccattcccatgatatcgaacaaggacaattgcttaccagtggcaagaccaccaaatcaatcttccatctgacccgtctctcaatcgcagggtcaatgtggattgccgaagtgcctgtttccataacagtcttcggattggattcgtccaattgcatatctgcggttttggtatccgattgattcatcatgatctgagtgaattggataagaaatggacatgcacgatgtacgaaatctcactggggggaaaaggagaacaataccccggcctttatatatgacaaactaccccggatttggcttatctctcgacagccgtgaatgcatgtagtgggtaggtgcgtgcgatccacttctggctctatggaaacgcgacatctagtccaagccactgagcattggcgttatctttcgttggtttgttttatttaataaatcgtttatagggcaggataaagcctgtggtaggtaggctgtaatcgtgccaagcaccaacacatctatagtgggccccaccagatagtcatttgtagaggcaggtatctttagtatctcgactgcatacaaaaggtacataaacatagtctcaatatctataaaccttgaactaattagggagaatgtaggaatatagttgtagagtagacagcgtcttgattacttagtatcaatgttagtaggaacatccagtatagagaataataaacttttccacatgatgtctatatctggtgattgctaacgagtgtctttacactttgatatcatatactcaggatcaatattagtggtagataacttgaaccaggctttcgctatatctttatctctttagatttcctgaagctggtctgatagttgagaaaatcgagatgatgcctctatgttgctcatgtaccttttgtatagtgtcgccatacaaaagatacctaatccttacaagcacccggtgattagccggtgagatctgcgggtacttgtacccgcagggccggtctctgttgccaccgaagtagatttgggatgcgggtacacgtacccgcacgtcaaatgatggcgagtatcgatgccaagataatgctatcggcaattgtaatacgtccagatagactatcatttagtagatcatacttagtctacaataaaagagctgatcccactgcggtggaaattgcaagtttcttgttcatcctattaccaccttggaattaagaataaggcttcaatatctttgaacttgcctgatcatcgataacttgcttacgtctttctccttgttaccactaccaccatgacagcccggaaacccgatcttcagcgtattgccaagccttggctgctgggtgctcaacggacgtacatcttcacgtctgccaacttgattgaccttgacgctggaacagtcatcaagaacacgaccatcaaactctccggtggccttgtatcattagtcgacacctccggagtagagactggcgacaatgtcgaccccgacgctgtgcaaatcgacctgaaaggcaaatacgtctgcccgggcttgatcgatagccatgtccacatcgctgcagtacctggttctttgagcctccgggaactgaaagaggtaagcagtacccagagtatgctacggcaaccgggtgtttgcaagtccatgctggaccgtggtttcacgacggtccgagattgtggaggagcgtcttttgccttaaaagaatcaatccaggaaggcatcatatccgggccgagattgttcattgctggacatgccctctcccaaacaggaggccatggagatcgtcgtcagcagcacgaccccaatgagtgctgtggggggcatgtgaatggggtcggccgtatcgtggatggagtggatcagtgcctgaagtatgcccgcgaggagttgcggcagggcgcggacttcatcaaaatcatgggtggtggcggggttgctagtgccacagacgagatccaacaccttcaattatccaatgatgagataaaggcgattgtcacagtggccaacaatgcgggcacgtatgttaccagccatgcgtacacgccagaggcgatccagcaggctatccgacagggagtcaaggggattgaacatggcaatctcattgacaaagccacagccgaaatgatgaaggagtacggcgtctttcttacccccaccctggtgacatacgcgacgatggccgctcccgagttcagcggattcctcccccctgtttctgcgggcaaaaaccgtgaagtcttggacaaaggccttctcgccctggagctagccaatgagattgggcttgatatttgctttggcacggatcttttaggtcctctgcattatgcccaaagtaaagaatttaccattcggagcactgtccagacaccactggagatccttcgaagcgctaccacgactcctgcgcggatgctgcgacagaatgaattcctgggcaaggttgctccagggtttgccgccgacttgctcgtcttgaatgcaaaccccttggatgatatcaccgttttggatcgaccggacgttcatttactagcaaccatcaaggaaggccgagtcgtgagctcgcgttggaatgtgttggacgttgaagaaaaccgtctgccaaagatcgagtgagaggtggaggggagagaagatgtacagtggaaatgaagaagaggttcgttctggagttcattgaagagtgcttcgtggtggcggcgaaagttttattgatagagtcgataaacatgcacggtgtgcaagaaatggcaccttaaacgggagatcaaaagatacattacacagaacaatactttccttgataatacgagccatcccgcaataataatatgcttcgaatcgcggctattgctggcagataactaggccaaaacgagatcttccttgatacggtaatgtataaccgttggcggatcttcgtaggctctgttcccttttttatagctgccgcaatcagaaagagtgttgggcagacttacttgtgggctcaattccattctcaagtcgctacggagtacggagtagacgggaggggtttaaggtagtgtggggaggatgtgtggggtgccataacctcgcattggtccgtgcacagattttggaccagcgtcttggcgcataatgtcattacataatcctgtcgaggctaccagcgctgtatcttttatatggcaactatatacgaaaggtacatgagcacaacatcgaaaatagtacgcaccgctaagtgtacattcatgctagtcacatcacgtgcaacacttcttttacggcccgataacccctcttacgtctgtgtttggtttgacctcagacttccgtataaatgatctttgcatttcaaattcccagattcttccatcgcctacgttatataccttaagaaaaagccgaaagcctgcgtacattcaatccaaacctcatcgctagcatcgacttcaatcaaaaaccctatggcgtcttccccggtgcactctcatgttatccacacgtccaaaggtccgaccacattcaggacacacgacggagcgatgtttgacatgctgtattttgatatggcgcatcaaggttgaatggctgctaaatgtcgtgtggcttgtgcagccctgccagaggcatctgaaacggccgtcggaactgaggtaaaaggaaaactattaactattaagtgggaagagtgagaaattctgactcacactcgtccctggtcttcaatatgagcagaggttgcttccacgtgagcgacttgaatgttggggttccgaattgtggtttgaccgggacggagagagtcttcagctctatacagcgcggtcgagagatgcggaggcatggctcagagaatgtttgtaaagaggccaacctgtagataataccggtgtctgtccggccgcagaggcaggtggttgcgtagtactagaaggtccaggatggtgattgcgttgctcagagccacagctaagctgaagcattcttctcatacttcaatcatcgaggtcagaagtgtattccataatagaaaagaagaagtaaggtagatgtctatactaaaagtgagttgggtgctttgtcttaaatctgccaggaaataatctgtccagtagacatactgtcaaagagaagttaaggttaaggcccctgaggtgggtccatatttactccgctccctccacttcctccgctcccaaagtctatgagtccaaattcaggtaacaaggcctcaatacccggttccttggcgaggggggtagttagctacatagctatttagttagttagtcaacttactaactatggtagatgattaaactactgccaagcaatatcaatgtacattcagatatgatcacgtgatatgccatgtggtggactggacccaccttcccttttaggaagtaattattcctatatatttcatagcaactccttcctcctaaccgacattccccccagtggctgagtgtgttgacacgcgtttaaaatgctaggttaggtactagctgtcagcgttcgacccacccagtgcacggtcataaatgttccaattacgctcccctaattggcccaccttgcttagtcgccggtcaggacctccagtaggtccggcaatgtgtgcgcaggtggggacgactagatcttagggtaaagatggttggggttacttaagcattatgatcccctaagtggcgacctgggagtataaccccaggcactggatgggaatgtccttttttgccttttttttcccttctactttcctctcaagtctatctccaaaactctatgcctgccgctcctctcccccacaaagctcattgacgcttactttagatatctatcatgaaagcagtattaatactatccaatgagagacatagtcacttagtcgcccgtaatagttaactagagatctgtttctaatttatcttagtccagtatgtatcgagcttgtatttttgtactatctcttctacattgtactccgtaccatctaccagatttctatgtttaaacccctccacggggaagcagttgaagcgagtcccgtagaataatatttgacaggagtgacttatttttgttaggtgtatacatacaaattatagatacctgccacattgattaaggcaggagcggtaccaaattaggaaggtgcacctaagatttcatccaaaggggggagggggggagagggctcgccatagcacagccctatatattatgtatgtgcagaagccaaaccaagaaaagaaaatcgacaaaaactccttttagggagacagacgaagggcccagatcactatacatatagactctctctgcgtgtacacaaacacacaatcccaagccaagacaaggctcgcatgcaatatacaccgggtatcgagcaaaaaacaacagcaattcatcgcaacggatcataattctgcagcgttcgcagcgttcgcagcattcgctctgcactgcttgctcatagtataaaccgcagtcgacgggtagcctcagccgccacgagagcacttattgccccgatgaagagacatatggagatggcgttatacctctccttgtccaggttcatccactgcgtgtccgaactgttgtcggccgcgggctcggcgcctggttcgaggaggctgaagacgatccagctgatgaaagtgccgacgaattggggtagcgtcgtgtacacattcagcacgcccaggtagatgccagccagttctcctgttgacgggatgttggaggcgcggtcctcctcgtcggtgtcgctgtcggtggaatcgtggtggttcagtcggagaacgtccagctcggtgtcggcggcggagttgcggaggctggcggaggtgatcattgtcacgccggatcgtgaggatgggattgcgggggaatagccgcccattgttagtttgttgatttccacgcccatgaaagcgaagggggcccagccgctgattgcccaggggataccgcatactgctactaggaaggttgcgaaggcgcgcgagtgtgctagaggggcgaatatcattgtggcggcgaacacgacgtgggatatcagccaggcggtttggaggtctggtcggattgcgctgatggctttgagaaccgctgcgacctttggcgggggtcgtgcggtgaagcgtatccgcttgctatcgggctgcatgatgcaaaagggtaggagtacagagctgaggactgttatggatgagaagaccgttaatgatagactgcccacgcggccgacttcaccaagcatatcggttgctttggccatgtcgtcttttggtacttcataacggaagtatgtttcaccaacccaggttgtgctgtagaagaggaaggggaaccagcctagttaatgttagcttgctgatttcctagtaaatgccgaatttcataccaatccaagcccaaaattgggcccagcaaattgcttgaatgcgaggcggcagttcgaaagtagttttgaacagctgggagaggacctgaatagcaccggcacttccatcatccctatcccaaaacattagttgacgacaataattatcggttcgagctcaactcaccttgccgagataaggactcgctcttttaccgagtatgaagtgactgccacagccaacaccaacgacaaagcagcgatcacagtcatctgcttgaactgcgtatctccaaggaaagtaccaaagatgctcacggtatcgatagcaccaaccacataagcaaagagctggccaatggcggacattctcccggctaaagaaaggtcagtgtgttttgggcggagacatatggggaagcgccataccccatgcggacccagcttgttgcgatggaatcggtagcgtatccacaatcagaccgcgacagcatgcttgcactaagatattgtaagctaccttcaattagtgcgagtacatgtgccacttaccaacgttgatggagaaatccaccgcataaatactcactacagccagggcaattgtgccatttttggcctgtagaaaaccaatattagcttccacgtagatagatttagccaggtgagggttccgataaacacgatatataccttttccgggtcttttacaaataaaccaacaatctctgatgtccaccctaagacaagcagacagaaagcgacaacaaacgagccaaagatcatgaaaggtctacgccgaccccatttcgatcgtgatcgatcggcaataactccaataagaggctggataatcaacccagataacgggccagcaatccacaccaacgaagtcttagactttgtcagaccgagctgaagaaggtaaggtgtacaatctagcagcgatcaagtcagcgatcataccctaagcacctaagcactattcggaacgggatgtgaatagctcttacaagtcatctcagtaccccacgtgaacctagaaaacaccaagtcagccacagacacaaaacaacgatccatggaatcctccaattgcgattgcgattgcaccaaaaaaaaaaaaaaaagcaaagctagacaatggaatgtcgcgcaacatctacatccatatatccaaacgccgaaacagagagggacgatacgcactgcaatccgaccaaactaaacgtcaaaagcgccatcctcgtagactgattccgacccttgatggagggcgtccccgcccatcgcgcagcctgcggcatcctgattatccacgcgctagcacgcactcaacaggtccgcgctcatgcacctgcacctgcaccaaacccagagtacgctaatgacggcccagccagtgacagaataccgattaccgattcgaaagtcgaaagcgccagacaggaagctcgtcgcgacgcgcaattgagaatcagacaaatatgtagaacgtgcgatgcagcagttcaggttcaggtgcagtccgggaatacgttccgaggaccaagaaaggggccggcagtagtccgctcgtatcggagaattaggaattgagtcgcgtgctcttttcggggtcagctcgcggggggccgaaacagcgcacggtacgtcgcgggttcgtcgcgactcgcttgttgacggcgcggagagcggggaggatgcgtgggttgctccggggtcgtcggtgggcgtctatgtcgtcgaaaggcgcctatggtggatttcagaaagacgttgaacagttcgaaggagaaggagagaaaatcggcgttggcctgagcgcaacgcctctatgcgggccccggccttatcgatttgattaatttacgagacagacccgctgggcttcaagcccttctgcagatccgggcttttttgttacgacagctagggtcgagggcgttttatttgttgtctgtgtacgggttctgtttccactttcaatgctttaggtttctttgctctccagttattgttgtttgcagccaagggctgggtcgccttatgtcagcctctgggatggaccctttgtcgctgattggcccgtgtggtgacgtaactcagggccctgtgcgccaattttagaaacacaggggaattatacgaagatatacgaagacacgggatatgacaatgtgcaatgtacgtgcattgggcaaaagagctacaggggctaatttgatatcgcttacctgacaggtgtacttttgctctacgctgtacatattgaaaaaaagatagaaatatgtggatgacagctaatcttatagcaatcccaagataaagggacatatccaccgaacaaaataagggcgtaagtatctttcttgcgttgcatccaattctaatatcgaattggtctcgaaaacctaagtatcacagtatgacgcgactcctgcctgccggccgaccaaccaaccagagtcagaaaatagagattttaattcctttgtatcccaatccgcttcccataatcatcgtaaacagctatagtccgaaaacctacagccggttgggggccgaggtggtgacgggccactggtagccagcggcgtcgctgaacttgtagccgtatgaagcagtgaagtcatcaagaacggcgggtccacgggagcctggaacgtgaattagctagagttagaaaagaacgaagagggaaaactcaccgtaggggtactccatggggatgatctccttgttgtcatccaagtagtgcaggagaggagtgaagatacgccagctggcatccaactcatcgtcacggacaaagttggagtggtcgcccttgaaggcgtccagaatcagggactcgtaggcctcggggatcttaaggtcggagaagcgacggcggtaggtcaagtccagctcggtaaccactgtctgcatggagagaccgggcagcttggagttcatcttaatatagacggactcgttgggctgaacacggatgacaagctcgttacggggaatgtccttgaagataccggaagtgacatccttgaactggatgcggacctcggtcttctgctcgttcagggcctttccggccttgaggatgaagggaacgccgtcccaacgctcattcttaatgtatgcaaccagagcgcagaaagtcgggcaacgtgaatccttaggcacagtatcgtcctcgaggtaaccgggcttgctgccttcgagggagcggccgtactggccgatgatgacgttcttgggctcaatggcgtccatagcgcgaaggacacggaccttctcatcacggatatcctcggaagagaaggaaatggggcgctccatggcgagcagtgtgagaacctgcagcaggtctatcaaaatgttagcatctttctatatctattcagtatgatgaatgacttacggttctgcataacatcacggataataccgaactcatcaaagtagccgccacggccctcggtgccgaaaggctccttgaatgtaatctgtagccggtattagaaccggaactccggactgagatcgcttcacatacctgaacgttatcgatgtggcggcggttccatgtagcgttgaagaactcgttgccgaatcgcagaataagaatgttcttgaccatctccttaccaaggtagtgatcaatacggaagatctcctcctccttccagttaggctccaaagccttctggaggtcgcgcgagctctgtaggtcctttccgaagggtttctcgacctataagaaagagtaggcgtatcaatatggggttcgttctagccagcttgtcccgagaaactcacaataatgcgagcgaggcctctcttaggatagcagttgcgcttcagctgctcggacacggtggtgaagacactgggtggcagtgccatgtagaacacgcggttctgctccttcgattggcgtttgttctcgatctcctcaaggtgcttgttcaggttgataaaacaatcatcttgatcatattggccggaaacgtaggaacacatcttgcagaactgacctaattgatcctcaacctcctttgtgggaatcttgatgtacgagcgaacgcgcttgaggtactcgtcgtggtccatctttgtccgcgcatatccgacgatatgaatgtccttgggcaggaatttgttgcggaactaggtcatacttgtcagtggataaccggtggatgctcagtagaaatagcacatacaaggccaaagagtgcagggaactataagctggtcagtacgtcaagagtcatcaccacctatggaaggggtacgcacggtcttcttcttcgccagatcaccggatgcgcctagtaccacgatgatggtatcatctttaagttcgacggtgctgaatgccatctccattgtcagtgttgcgtttaattgaccgagaaagaattttgcattggacgcggaatcgaggggttgagcgggggagctctctgggcacagaaattctgcagaagcgttccagggagggatcgactatggggaagaaggcaataacgtccacaatagcacaatgttgaggggataagttgaggttgaattgagctggaggcagccggtgggcttccgcaaccgtggaaagagtgatgtcagagacgcaagaggggaaactcacccagcaccatggcggtcatcggttttgttaatcacagacatcttgcaccaaccgcctaatacacaaagtgaagaagaagagtcgagcggagtttaaagagaaagagaaatattgtagagaactccaacaggaccggagtacttttttaaggaagttactcacacagcttcggctggtggggctttggctgggtattgatgtattttatgacttcaaatacaaaatggttttgagtaatctacttgattctgatatttaccatgactatttcgatgccgacctaccctagcctcgtggcgaattcagtcaattttcttatatcaagttctttctgacagatcttcatggtcattctgactgaaatctagcccggagcttacccgtgatgactatcaaccccacgcctactatcagtctatacaacatacagaactgattcggcctcggggtaatacaaagtacctcgggtcaattgtcgataatatcggacatgagcctgccgctaattcttattctaataacagatctagaggtcatctgataagaagtgcggtttactcctaaatgcggatctatataaagaggctaaattcgaagatagagtaagacgtgtccataacactgtcctatatttatgttaatagtgtaagtagttactccggagttactccgtactgttagttatagtatgcacaactttgcggtctaccccgtataccctcgtatagtatgcatgtatgttgtattcaaagcggagcagagaagctatcgcatcagggtaaggttgcagtgtccactaaaatccttcagtgtatctaacgaaagtactgcgtaccaaacacaatacaataccttcgagcacgcaacttgataagccttcgttgtaccggtgacccaaatcgtgggggatggatcggcaggttggtcatttggacttttggacccagacggattctgttttcccgcgagaggccactttcttaagtccggtttgggactggtattaaccccatctcgaattcttcccaatccggaacatactattaaccgttgctacttagggctatacgaatattatacgaccctatctacactctacgcgatctgttgtctctcggtctcttgaaaattgtccaagttttcatgaatacatccatggatacatacggtcccaaatgtaatcgcggtggggcaggatacaggaacttctagatttcccaatcagtggtctcggtctgggtgaagtatatgatggaccggaacgctacccggatcatgtcactgtcactggtgatcagttggagatatgattgtttcgatgttgtcaaggacactggctaggttggataaaaacaattattcactccctagacctgccgacaataccctctgcaatttgctttttcctggatgaaaccttccaactttgaaggttggaaccctgtcgtcatggctggagtttgtcagctgggaagctccaggcttgaagcttggacgtgtcgttcggactactgtagcccgagtggcagtggaaagtacaggcggtaaatggtcggtaaatgacctcgagggcgcggagcggagaaacaagaatccccaagcttatctcatctcagattttgcctatctaatcgctgatgtaatagagcggtgtggcaatcacgggatctcgcttagccctgatgcgtcacgtggtcggtggctcgctaagatcccgtttgggctagggcgaaaaccaacacacggctgcccaaattgattgtgcgcctgactctatcgaagcgacgacaaccacgacaaacgggaacgacttttgatcttgcgggtcattccttcgactttctttccttgcccgctccccacagaaacgccgacacaatgccttcggaacaaggacaccgccgtgagtgaatccctcgatgtcttatcgatcgtcgttttggcggtctcgaaatcgcaaagccgcattatgagcaggcacattgtgtggtcgcacactggataaaagacatatatgctaacgatttcttcttttctagtctacgtcaagtaagttaccaccgcacttttatcgcattcaaggatacaccagttcgacatggaggaccgatttgggggacccaagacatcgccactcaaatcgaagcaccatacgatatgaacagagaattaatacgagtttctttttacaggggacgtcacctgagcttccagcgcagcaagcacgccctcacccccaacaccaggtatctacaccctgcgcacccaaattgaatgctcggatggaaatctgatatatggttatacagcttgatcaagattgagggtgttgatgacactaagtccgccaagttctacctcggcaagaaggtcgctttcgtttaccgtgctaagcgtgaggtccgcggctccaacattcgggtgatctggggcaaggtcacccggtcgcacggtacgtgaatacaacagacagttccatggccatattcgaatggtcctctgggagaaacctcgaactcgaatttcctgtatctgactctttccaggcaactccggtgttgtgcgcgccaagttccgcaacaacctcccccccaagtccctcggcgccaccgtccgtgtcatgctctacccctccaacatctaaacggcttctttgtgttgttttcagtgggcgattcccttcttcgcacagacggtcggtcaggcaaggaaaagtcgacggaacgagccgatgttgatttgaggtgatggagttggcgggtggataacgttttgttcatgggagaaggcagggccaacaaagccctacgaatcaaaaaattacactttcatagctgtgtcggcccaagatactgggaacgagcttcgtctcgatatttctccttgttcttacaattggcgagcatgatgtgtctggtcgcgcagcgtcacttctcccattttgtatctgacgcttaaacgcaccaaattccataccatttcaaatttcaacagaccggtcaatcgatccgcttcttcgtgcgtccggcttccgtttttttgttctagaagaaattgcatttctgctctggctccaaattaccatggcattgttgcgaattgttgcgaatataattatactccatggcaacagataaacagacaaacagctcgtattcaaaatcagtagctctagcactaagcctgtgtggctagatccctaggttgatgtggatacccatgtcgaactattatatatcgattcgaggttataattctacgatgtaaagcaaaatcccaccgatattctcctttttattgtctcaataaacccacaagaaaaagatgtacaaattatataggccaacataaaacccgatccgaactccactttagccgaagtatatatctccaagtatgcaaaacaaaccaagtatcctaaaccgaaatgcccaacaccaaaattccatcataaatcttacaaactctccttatgaaccgcctgaatatgcgccttcaaattctcccgtcgactcgaagcatggggacaccgcggacacttgaaagcgcgcggagtgacatgcagagtctcgatgtgtcgcatgagcactcccttgtgcgagaaaaaacggtcatatcgacagccctcccatttgcattcgaaagtcccgtgatcattgccacccctggatgaagcgaaacacgtttagaacattgattacgatagtccttggaaagaagaaaacgaaaatacatacttcttcttggctgcagggccacgggattgacacggcattttcgtctggctaggctctatgctggcatcatcctgccgaagcggctcgtttattataggtgccgagacggggagatcatcccatctggtgccgtacaggcttgctggggagtgtacggcggtggttgcttgggatgaaatggatgtcgggctgtgattggtagaccggctgtgattggtagaccggctgatggtgcctgggtttagatataatggggagggagtgggagagagtattctgctggggataaccggtgtagaggggaaacatgaggaggcaaaggggggctgtgccgagggaggttgcagctgatagttgtatgaaagaggttgaggggtgatcgctctcgtggtgagcgatggatcagtggatggagaggtgagaagatactcgtctgtccaatcccttaaggcaatgtcagaccacggaaattcggactccgagatacttgggatgttgttgcgtgttggccacgccatcttgcgtacaatcaccgatctgggtctggatgtagagagtaagcgttggggaggcagagacaagatctagaaaatgctgagtgagtgtcttgagccgatgcagcatggagtatttatgaaatccgagccgatgtgaattgtggtatgcagcggtcaacttcactcgacgtcacacagttgggagacgacacctataaaaaaggcctggggaaagtggcgcaaccagttcggccaaaccctaggtttgtactagaaaacctggcttagatcctataacgccaggatctagatccttgcatcgactccagcttcacatcagatgagacaaacgcaacctccacgaaaccatatgatcgtggcgtttttagcgggctgagcataaatccccgggtttctgggctctcaggctccttggcagggaactcatcatttttattggtgaattcttagtatccgtttcagaaagtttctagtatgttgggaacaaaagcgacagaaggattactatcatttgaaagtattatcatgctgcaagccgtggccaaccgtaccaataggatgaggttgcagccaggctgactgggaatatacgagagatcggcacattatgatgtctattctcatattttccctattcaccgtactatttcccgttccttttttttcatgcagccggcccatgacaatggcaatggaagatatatccggaaagcctaaccgtctactgacagggatcggggtttcattagcacttggggcagttgaaagtattaaagttaagatattatcactatttattccagggactctaatttagctgtagccatagcataacgagagaccaaagatccgactttctgtaaagttagggttacaggaactgtgcaggacgccggtacatacatctactgacccgatttcgtatcccgggatatccccaaaataatagagaaatcctcgaatattagggttaagcactgagtgtgacgcttgtacatacatacactcgatgtggcgcagtttaattgcatgagccgacccgatttcctgcctaatctcatcatttcttactcccaacgagaatatatacgaggctgtgtctatgcgttgacatctacaactgttacttgccagatgttcccaataaagagtggattcgttgagttttatatggatactggtagacaaaaaccgccgtacacgtccaggggcgagggttgggataacatcaccacacaaacaagagagccaatttccttgcgacctaccaaacgcacgaccaaattccaccataagaaagcagtaagactggaattggcctgaaagggcagacgaacaagttgcaatgcaaagggcgcagcaaggttcctggcggttgcctttggttgccttaccaatgatatcaaggctaaggtgatggctgaaatgggtccacacctccatgcttatcctgaccagaaaaagggcggaagcatctgtttcgtaggtgtcaacaagcttgacgcccagatggcccgggagattttgaatgatctcctgaaactcctttgtcgcgtccttgtgtcgaccatcgagagttagactgacaaggatattcttgtcgcgaggggccgctctggtagcgacatgggattctgcttaccgggtgatgttgctcttttcacaaacgccggggcgattgggtgtgacccaccctcctaaggagtgataaccatgttacgcgccgggcttttataaagaaaagagtgcactctaacgagaacactaaacatggggaagagaaagaaagaaaacggaactcaggacaatggtggggtccttatgcccctgcgggctttgccatactctcgcttgtccattgggaaagaatgacttcccccggaaaggaaggaacgatcgaccaacgacctcaaatgagtcccgatcatgataccctaggggaatatctgggcgctgttccctagaagcccggcgcctgagcgatgtctttgaagactcgatatactgggtcgggataggttgtccctttgttcggctcatcggggggagggagtgactaccttggccaagctctgaatcagctatggctccattcgcgtgctcttcggtagcttgaccaaagcgtcgaattgaggctgcatctttcgattctaaaacgcctttcatctcaggtccgtggtctcattccaggatatcttctgcaagtctcaaggttcttggctcttgctggtccaattctccgcgaaacccaaggggtcaaaatgtccgaaaaacagggcgtgaccggggggaaaccgggttcttgcatgtgctgaagctattgattttttctttggctttgggctcaggagcccgacgatagatctttcctttctaagagggatggtgcttccaagaacaagtctgccactgttgaaattgaccttgactcccacgccgcattgttatttgccatctgcgtgacggcagtggatttatttgccggtcaccacgcgagctccgtatttcttggccgggccctaacgagggcgaatccgtccatagaatcggatcggtgaagccagcggtttggaccatccatgaaagagtcgcagagagtgatttcagatgagatgaaggttgatattgaccagcaagggaccagggattggacagacaaagtatctctcttgatcaccggaaggagtcatgttggcttatccctagcaaaacaaagcctaccagcaggctgaaacagtgatacaaaaagatgttgattttctcactctctccaatccctgatcctggcgagcaataagttacaggcccgatgaagtttgtgcccacacctcatgtacctacgcggtaacatccttcttccaggtgttcttccaggccttcgaatttgcaccaccactagcaggcactcgccgatgatgacctggtccttcacaagaatggatccctcgaataccaggcaaacagccaccagttgagttccaggccccgttttctctcgaatcacgctgccgtgcctccgtaccacggagctgatgaaatttccacccttgttcgtgcatccgatggtctgaaacacgctgctatagtcctcggctgtctccattagggacgatgtggctatagtaactgtgcgtattcaaacccagggtgccatgattgattgcttgtggtgagaagggaaacagtcgtggtgccgggagctgatgaacaggtcgattttccagtccataccatagtaccacgatttcgaacccctgccttgactccgacgatagcgaacttctcggggaagttagtctgctataacgatagccttcatatcggtaccaatgctatctcccgccaacgcctgcgctggtgctcggttcgagcttaccaagtgacgaagccttctccaaaagaatctgaccggacgtccacgattgcaggagagcctcatgaccatctatccacccgtgtgtgcagccatcactttgtcactgaagaatgccttattgggcgacgagcgaaacggagacaggagacaatgcacatcgggtggatgtactacaagggagttcagaagccaaagtaatgattcgttcaccacttgctcgtcttttgtttcttctccgcgatctccacatcggccgcagctgcagcggaaacaacggatcacttgctgtagctgcgacttccgactctagcgtcatgcacgcacttgtgggtgatgctggtgacaaacgcatggatgaaaagtctcccatcatgcggtgtcgtcgacaatcaaggagaaggtcatgttctgcgaaccacattcatccaaggatcaagtcgtgtcttcctgggtctgcaaacagtatgtgatgttgctgtttgatagggtgagaatgatagcgtgcgtgctcacgtccaatatatagcgtatggataagcatcaggtcttgggcttgaactgcagctgtcgagttattgtcagttgaggccaaatattagacagcaaaattattcaggacgtaccatgggtatcatatggtgatagatgcatccgcccatcccctattagaaggaggggaagaccggacattgttgcagttcttgcgttgattcttttcccgatcattgtgaaaggaatccgcggcaatatttggaggaaggctgagtataatgataaaatataggaatcaaagccgagaagtcattgatcaaagttctcattgtatttatcaggcgatcggggggtgagaattccatgaggcataagagaccagataaccatgaaagagaagtgagagagatatacccagaaatcgaggctcaagagaaacctgcctgctgatgacctgaaacgaccagcatcgtatcccgagacccaagtagcttggagatataacggtgaagtgaaagaggaagaaccgtgattgagctcggctgatgcgaggagggggggatgggagagagacgtgactattgctttgattgtttgtgtttgggccgtttgaaagcatttgacaaaaattcacaatgtccagctgttgctgtctcttttgcgggaatggcatctcggtgtctagcaaacccgctttctggggggtttacaaaaatcgatgaacagcctcaccattaaggctaattgctgggtgtccaccagtgcatggtggttacggcccgagagatgaggcataaacaggcttcaacaaggtataagaaaggctggaggtgtaaatcagtgtgctgtatgggagagaaagggggtcagaagttgttgaataactcacttttataattatagagaatttcctcggtataagtcaaaaattggtggtcatctctatatcgcatatcttcaagatcgcctataccaagcaatatagcagcagttgtatggtttggggcgacttcaatccttggagaagggaggttgaaacgccaccaacccgagtacatttggttcgtgacggtccaaactgccagattggcgagcaaccataggttggaggtgaactgagaatcgtaagatcctatactacaggagggctgttgaatgcccaagataatataatataatataacatggatgtgcagtttccatgagttgaaacttctaagatattgtcatgtacttatacagctgacaccaggggcaaatggagcttgataaagaagacacagtgatcaaacctggtatagaattatatagattttggtgggttggctttatttattatacataaaggctcaatttgcatcatgactcatatcaaacagtaacaaagaacaactccatggcaacccaagtgagaggcattgcgactgtaataaaaattaaatagatatgcattaacttttaaggagaatgtgtgctaagtaacactcgcggacggggaattagtaaggtatccagagggagagagattaggcctcgatttcgggcttcgagtcagcctttcgctgagagtcgataagctcctggcgggcacgctcttgctcagcaagaccggtcttctggacggtgtgatggcgggtcagctcacggcggcgaactaacaaagcgagaacgaagccaaggcaagcgatggcggtgtagaagatccacatgcggttcagggcatgtgtgaaggcttccataacgaccttgcgctgggagggagtaagcctcttgataagggcctttgaagagctgctaaaggaggcagaaacaattgcagcatcttcagcgcctagggcggcgatgagcttggctgattgttggctcatgatgttttggtaaatgacagtgcctagaacaacggacatggaagtggaaagttgacggacaaagccgaaagtggctgttgccgtggccatgtcggcagggcggatgttggcttggaaagcgaccaaaggtgcctggaaattaggaccaataccgataccagtgattaactggtagatgatgatacggggccatgaagcgtaggccttgaggtcaatgaaaagtccgaatccaagagacatcaaggtcataccgccgatgatcagctcgcggaagcgaccagtcttcttcataacgacacccgtggccgcggagccgattgcaagagacaacaccagaggcaggacatacacaccactcagaatgggagtcgcttggaggactgtttggaagtaaagcggcagatagtaggtagcggcgatgaaagcgaagccgtggcagaaacaaacgagcaggatgagaatgttgtaccactcgttgaacagtcgcgggggaatgattgggaacttggcaaccttccattccaggaacattgccagagcccaagttaacacaccgaagacaattagacagatgacagtaggtgaggcccaggggtagttgacacctccgaactccaggccgaagaggaacatcagcgtcccgccgatgatcaagaacgttcctgtccaatcaatgcagcgcagaccagcccagaatggagtcttgggcgattcaatgtgaaggaagaggacaaggatagcaagcgagacacctccaaccggaaggttgagatagaaacaccagcgccaagtcacttccgtcgtgaaagctccgccaataacaggaccaagagcgcctgcgacggcccaggttgcaccgaaaagaccatagtacatcggacgatctctgtatacaagttagcctcgttgcatcccagaccaagaagtcatatcatacctcaagctgaagagatccgaaacactgatattagccaggataatgataccaccaccaccgacaccctgaaccgctcgaccggcgataatcgtggccatattatgcgccaaagcgcagatcagactgccaaccaggaagacaacatttgccaagacaatgatagactttcttccccagatatcactgatcttaccccacagagggatacaggcggcattcgccaggagatatgacgatgcgatccatgagaaaccgctctccgaggcaccaaactgcgcggcaatagtgggaagggcggtggaaataatagtctgcaagatcaacgttaatgaccgaagcaaggggaatcaagtgagcatacacataccatatccaaagctgccaagaatagagccaactaaatacgacatcaaattagctttctgcacttcacgaagtttccccgcctcggagggtttcttacacatagcgccatcatcacgacaatgatctttttcttgcccatttttgctgcctgggagggtgcgtggtctagaggcgcaccctctgttgtcttttccgtcaaattctcatcgttgtgttggccagctacctcagttacctggtcgggggtatcgggggacttttccgtgtggggttgatcgatttcagtattactgctcgaggcgtctggttgatggcgctcactcatcatgatttgtgggggaaaagaaagggagaaaaggtttctagaaagaaacggcgttaagagtccgttccgtccaagctaagaaatgtccgaccgcggaaaatattttttggctgctagaacggtagaatcgatatgatacatatattataaaggggtcatcggatctcgtattttcggggtttcaaagttgaaaggcgaggccgaagtactaaattgtcgaatccagtggatcgtcggtgtcggcgctcggataagccccgatgccgagcttcagggcttgtttttacgaaaacgtgagtcattggttagacatcttgttttacgagggccaaaaatggacaaatatatttctaacatatcgctgttggatggggtggaggctgatcgcccttgttgtcaatttgaagtggccatctccctgatcttcgacgatagagacatagtataaaggagaatacttgcggagaaatatctacgatgggaccaatgcggtgcgaagaacacgtggttgtcatttgagagagagccagctcgcagctcatgcagagagcctgaccgactttcagatttaattagaacaaagtgcaaaccatcagaatcaactcgcaaccacgtgagataggcagctggcagcccctagtcatatctcgacacgacacaataacgatgcggtccatgagaaaccgctcacagagaagacccaccatttaatcacggcctccactggccaactcagagagccattgccgatgttgaacatgagccaaagcagcgaagtagtctgagagctcgtggaattgtagttggaagcgtttctttagagccagtggattgcatctgggaaatctcagaccatgcgatttcgatggcgatggcgggaataatgcgaattattaagaattgaaagagtgttccaatatcgtgtccatggccttccccgggaatacgtaatggaatcactccacgccgcttcgttttaagcggcaaccgtagctttggatactcgcatgacgctgccctgatctataggctatagcttcaatgtccgcgaaattgaagacgggagcggtaagacttgaggcagccaaagcttggaatctgacgttaataattcgctcgtgggtttgtgagttgtgtgtataaatatcagcacacggacgatagccatggaattccgcggatgtcgcgcattggaaagggtgtagaagatatattccttggggaagccacgaacggtaactcggagggcctgtctttgacaccttgattctcacatttggtgacccaggagagttcgcgtcgaatgcgatttataagtatcaaaaggcgcctaaccctaacgttagtcgctcatcgcgttcttggggcctcaagatgatgccaaactgcatagcactggaggtacggagtaactacgcgagatcttggttatcggcggggccagagatgacgctagacctaaaagaggttagcgtagctttcatgtgggaataggtcgggcctctacgtatcgtaagcttctaaggttgcgatgcgtgatgacaatctcaccgtccaaggcccccagggctccctcaccttcgattctaactcgagtccagcactcagcttgggccatcttcagtgcggagctcatcttcaatcatggtacacactcagagccttcccatagagctcctagatctcattgtctcttttgtccgcccagatgatgagcttccgagcagagatcgaagaatgaaagacgatattgaaactctgcgcaatgtttgcctagtttcgcggaagttctatgccctgggccagccgttactcttccgtgttcttttttatgatggttcgcatgattatcgaatgtttaccagaacaatttgtcgtcgtccagatcttgcaaagcatgtgcatcagatctgcatactgcctaccctatccttcggtacccaccttcttgacgcagaagacctcgagctgtccaaaggcataatcgaggaccttcagttgggcgatcaggaggacacatggatttcgtctatagagggagccgacctcggccttttcacagcattagtagccagcaaagcccccaatcttcgctggctacatctgccagtatcccaattctggattcagccattcatccagctattccgccacaatcctgaatttttgtcaaaccttgagtctatctggattgaaagcgatgaagaatattgcaacacggagatgtattccagaatgaacattgcttcctatgagaaattcctcacccttcccaaggtcaaatcttcgacctttgagtacggtgttctctgcgacgcttaccttcgtccgttcccatcttcctggctgcctggaacattggagacggaaagactggcctttcaccactgccaggtcgatcctttcgccctcgaaaagctcatgcaagcgtgcaagaagctaaaagccttcacctacaacaatttcagcttgcacccgaacaaccgacgaaatcgtgcggaaaaactgcccgagttcaacgctaagcaggcctacgaagccgtcctcctacacaaggacactctcgagctcttccacctggagtacggaacgaaaccaccgcatattgatatcttcgagcaagtcctttctggccgcgtccaggttggctcattccgcgatttctccgtgctcgagaccatcgtcatcacacacgcttctcttccaccacaccccgaattccccagctcgttaaagacactccatatcatgaactgcaaggcatctgtctgggaattgacgcagagcatcgcgaaagattgtgaaaatggtctttatccggagttgactgatgtcagcgtattcgcaaccgacatcacaaagcctgctaagcttcaaggaaaacccctacagcaatgtctccttgatctagaggagatgttcaaaggaaccaaagtgaatttccaaatctcaccgtatgaaataccttattctgatgattacgataatctcgacctctatcgttcttacactgctcaggaatgatgatgtattgttctactacggcagccgtttttaaaatggcagccgggccacatatcgactagcattatgatcgagttcggttatgaggaagatttccaagaacccgccaagagcgaatcccagctggatgcaatccgaccacatgttttggattgcttatggagcgggctagggtggacactaagcctcgatgagatcatttataacaatacatgggaaacagacagtaacgaaagctcgatcgtctagtccagttactccagccattgattctgttataatatccacgataatattccttatcatgtaataatatctctgaccgaccatgtgagttttaacattttttgagggacgagtgtatgccttatttggagagatggccaatacttgggaaatctcaatgcattcatgttccacgcatattcgtggctcgatgattcctcgatgaacatgtattggccagtgttctggaaattctatgacaaaagcaaattggggtttgggtataatgaaaagagccagagcgtagagagaacatcacgactaggaaaaggaaatcgagagtaccacgtatggtaatggagcagaatgctttactcctgcaatagaagaatctctgtaaaaagcgatttccagttagccactgatccccaacaacacaacagacaccaaaacctaccagtcaaagcttcttcaaagcttagggtgatatacccatcccgatcatcatcataccgcttgaacacatccgtcatacgcttcagactgatacaagcctgaacgaaaagatcaaagctcataccagtagacctgtagtccttaggcgcattgctcatctgcttagccttggcttcaaagacaccaaagataacagaaatgaacttcccgctaagacgatatccgaacgcaacaagcgcgttctcgaactcccgctggctgatgcgtccactgcggtcttcgtcaaagcgatcgaacagctcccgccatgcagccagataccgccacagtgagacaaactcgtcgaagttgatggtcccactgccgtcgcggtcgaacatccggatcatcagcctgaccgtccgcgggtggaaggacgtgtagtcgccgttcacgagcgcgctgccgagctccccttcggtgagggtgccggagtgggacgcgttcgcggcgcggaagagggggaagagttgttgcgggtcatcgctgggtgctgtcaatggcggtggggcgggcgattggggaggccgcgatgagggcgggggtcggttgcgctgggggtgtactggtggggggccgaacccgtagttctggggtggcggggaggggtggagggggtgaggacgagactgggactggctgaagtgttgacttggcgggggcgcgtttgttgccgaggggcggccgctgtaggagttggagtgggagtgggagtggtaaggctgggaatcaaggcgtggaggcgcggaggcgtatgcgtgctggggagcgctagagctggatacaggaacacgtggagggacaccgctgtgggttccttgcggtgacgggcgagatgggagcggtttttgggtgtgactcggagtgtggcctgatacactcatgttgcttaacatctgcgccgcctaattgagggttaacgaaaggagtctaaggcgtgtaacagatgttgtacctcttctggctcagcatgactaatatttcccaagtcagtaatcagtagctgcagaagatgcctagagtatgcacttacgctggcagcgcgtcggggttgtaggatttgttgtaggccatagtcggagcgctggaggtgacacaatcaagagaaagaatgcgacacaggaagtgcaaaggtatatgaagaagaagaagaataaaaggaggcacctgaaagcggagccgggggggggcattgatttttagcgcatgtgaggaaccttgtcggaggaactgcggagggtacatgacgaattgagagctacatattggtttagagggtttatactgtcgagtttatgaatatttttagtatatgagatagctagagacacctacatataagcagactgtttctattgattttgttcaatataggtccatggatttgccaggaagaaccttggaatacctgcttcactatgaggctctgctttaaaattaacaaaaacatatccaaactacggagtacatgaatctatcgaattaacgcccctagatccacctagccagcgctatgttagaactaatacgaatacgagtttcgagaagtgcgtggtttctattccggacccctcaatatacagcgcagaactcgaatccccgcgctaatacgtatagtacgggtgtaccgcttgcattgtaggtttggatagtattagagagacgagtctacaaatttcaggggcgaaatacgcgacgtaactgagattggaagaggctgagttgtgtgcccaacttgaacgccccgctccactctatggcgtacggagtacagatatccaccgcgttcacttaaccactacagaccttcaatgacagcatgctctcgcttgacggcacgctataatggatcctacttcaatgatgtcactttttgctatcacgagatagctctttatagtgcgctttcctaatgtagaacaggctaaagcgagatgggacttcggaaatttggaatttaagagaccaatgagagctaaccacttctagatatataatctatgacttctcttctcattgacttatgtgatgtgtatattatactggatataattcagttgcgggtcattgcctatatctgactacgactgctgtatattctatattgtaaacaggaagtaagcttgaaagatttcatttctcatttctcagttaacgttagcagggtatctcaaaggcaagaacgcttgatattctgcaaaaatgcgctaggcgcatgaacaaaccactcctcggtcgaacctcgttggcttgtcgtcggcgtcgtgaaatttaaacgccctggtacaggccacgagcgacgagggacacctccggtgcttgctcctcgagcacggcgatgatctcctcccaagccttctcctggagttcctcgccctctaggatagtagtcagcgcagtcgactcactataaaatcattagcaatggtcaattgaaacagggtgaaagatgatcttactcaagatatccctcactgcgccagcatttcccctgcgattcgaggccctggagggtagcactgaccagcgaacggcttccctgctcagtagtacgggcgaaaaacgtgtgcataacccaaacgatacacttctcccaccaatgagaatacttgcgacccaaagccgagatgcacagtccggggctgacagtgttgacaaccagagtgtgagtgccgtcgtcgttgcacacgatattggcgattttcttgatcacgatttcgagcagaagcttcgaaatgccgtactgcttgggaccgttgaagttgtccgggtcgttgacgtgagcgaggatcgagccatcggtctggatgcttgcgggcttgacgcgaacgaattgctggctggaaacgagagttaggtgggtggggttatcgacgtaggagcttttctttagcttaggaagtagaagtatggccaacatcaaggtcgacagggtgttgacctgtagggtctcctcccagccctcgggggactgatagtattcgcgattccaaagtccagcgttaagcaacgcgacgtcaacacggtccaactcgacatggacgcgttcggcgaagtctttgacgctctggaagctgttcatctcgagctgccacactttgactacgttgcgtcggttcgtggctcgttcgaggtcaactttggccttgttgcccttttcgatgctgcgagatccgataatgagcaactcgacgccgagattgaggattttgatggctgcttcaaagccaaggccagaagtggcacctgtcaaaatgacgatcttaccagcgaaggacgcaccttgaggatcaaggggaggagtgtactgcatcttgaggaggcgaaagatggccgccatgatggaaattgggatgcaaaaggatggaagaataaatcaaagtaaacaaagtaccaagggtgcgaggcgcgtgatgaatgttttggggaagaaaaaaagccgataacaccagggccgataaaggatagcgataaagataagagataaggatacgattagtgcagatctaccaaggtacgaaagcggtgtataactatatccgtacacggacctcactgtaacatgtcaaataataggagtatgaataactgcagatcattttgccgagtatggttcgcctcttttgtgttgacccttaccatagtgcagatcatagacgccaaccttggaagatgaacaggaataacatgtcaccatttggactgttcattcggatccccaggaacttctcatatcgagcgatatcgagcgatatcgcgaggatgtttgagtcagcaagaatactagcaatgacggcaattctggacgcaatcttagataagatgtgtcggtgttcatgaaaatggaaccgacgatatagcacgaagatagaagcgagaagcactcgaggaactcgagttgacgttgcaacagacgcagtcgtttcggcatcgtgatattcccggacagagggcatgctcagcgtgccatctatcgcaatgccaatatctgtgctttcagaatcctatcctggtgattgattgtcttgatggccatagcatttgtgatattgaaattgttccaactgagctatatgatatcagaacattcaaggcacaggagtgagcccagcgagatcaaatcccattccagtgatgatatcgcggagagaagtgatgtcaaagctaaggcgatcagtgccctggcggctcgggtcaaccacgccgtcaaaaatgtcttctatggtcagcgaaataggcatttccaccgggccccgaaccaggaaaacctggttattccaggtcatttgtgccttgcccgtggcatttcggcatcagagttcgattgtactgcacactcctctcttacgctggaagaatctgataagaatgaccttgcgtacattgataccaacgccctctagccgaaatttcgcatcctataacaggcttgagtaggtttggttgaaaccaacctctatgaccacggttggttgatgggttgtcatagggaatgatgaatgtgttcggtttttttgatctccaaaataatttgaaatttttagaacttctttatgatgaactctttctggacacatgtgtatttgatcaagaagcgtaagaaggcaatttccaacctcctcggccacggaggttgagacaaggacgagtaaagtgactgggtgaagaatccaccagcttcaatggtactcaatgcctggtctgcttttttcttcagggtccttggccgaggtccacatcatcctcggtatcagaaccagactgatggactgaatttgcacccttagcaattcgtgggtgatgcttcaagagtggtgagaaggacaaggagaaggagaaagtgcgatgtcagcatatataatagctagctaccacgtgacccccaggataatatcatcatcttccctactatccctaggtaccagcgtaatagatatctcaaaaagcatctaaatagaccatcagattgatatgagaaggctattcttgtttactacgtgaaccagaagttaaagatgcaaaagataaggtagaatcaaagtgagccgatataccaagtccctgaagatatttcctctactctatatatagaccatctcacttgtatcgcatttgtacctcactggtacgttacatgtatctcaaatgttgtgctttgaaagtgttaagatgcctcatccatcacgcagatggcgagatgcccaagaacaaacaatgcaaacaaaatcagtgtataatcagtcttgggcaacttcaacattcagaacgttcacaattgtggtcaaatccaatttataacagcatcttctttagcaaagaattcaagtctctggttttcttttctgaagttgacgcgctgatcacagaaatcagccttaaagctgttgccggagcacattattaatccacctccgccagggcttggaaggtcggaatccgcagccaataaactcgttggagcgcatttaatatcgtctatttgatatggctgccattgcacaaggtcatcaggtccatccggacggtcgcacgtggaagagtcattttcctaagggtgatctttgggtatttggctatgggtgggttaactcattgtttcgaagttccattgagccgtcaaatatcaaatactgattatgattataggagcttgatctggaaaccgcctccacactatggtacgtgagactggaatgtaaaagtgcggcactaaaacgaaacatcgtgttggttgcttttgaccaagaatcaattgactaattataccatctagaccagcgtgtaccgggctatattaatggctatgttcggcgtttctggcaggtacgtgaacccgtcatttgaatgggagactttatatttgtacattcaagataaccagactaacattgtggttttccatcaattctaggccaggtatgtcgttgactatgtgcaatatgcagacatcgcaatgtaaacatgccgagaaccacaaatcgctaacttgatctcaaagtaccgatcaccgtggcacccccgagcaaccgggccgagtagtcaccgtaatcgagcgaagcttctgggaaaccctgaacgatccggtatgttttacatacgcctcttgttcatacactcattgatataacccctagctcgctcacctagaatctgaagctgcctccacaggcaaagtctggggtgcggcgtatcacatccctgcatctcatgccgaagaagtccatgactacctcgacgaacgggagatcgacgggtacagtgcgcactatacgccattccacccgaccgtggatgtcgaaggagccgcaggatcgaccgggccctctccaatcatttgcatggtctacatcggccagccgactaacccgcagttcctgcgtgaagcagctcagcgcgagccgcagaatgtggcgcaggttatcagtgctgggcatgggttgagcggcaagggttctgagtatttgttcttgttggagaaggctcttgagggtcttgggcttgggactgcggatgttcatgttacggatttggttaagagggttaaggctattgaggctgaggggcttgcggatgctgaggagaaggaggctggactgaaggttaccaggtctttggagggcgagggtgatgagtctgatcgtgagaatagccattgattgaggtgcatgggtcaaggctttgttggtgacttttgaagttttttgtttgcacatatataggttacatatttgcctagcacaatagatagatagcgaaagaagcgactggatagatgacatgggttctttttcctaaatataggggggggggggggggggggggtttgggtatattttnnnnnnnnnnnnnnnnnnnnnnnnnnnnnnnnnnnnnnnnnnnnnnnnnnnnnnnnnnnnnnnnnnnnnnnnnnnnnnnnnnnnnnnnnnnnnnnnnnnnnnnnnnnnnnnnnnnnnnnnnnnnnnnnnnnnnnnnnnnnnnnnnnnnnnnnnnnnnnnnnnnnnnnnnnnnnnnnnnnnnnnnnnnnnnnnnnnnnnnnnnnnnnnnnnnnnnnnnnnnnnnnnnnnnnnnnnnnnnnnnnnnnnnnnnnnnnnnnnnnnnnnnnnnnnnnnnnnnnnnnnnnnnnnnnnnnnnnnnnnnnnnnnnnnnnnnnnnnnnnnnnnnnnnnnnnnnnnnnnnnnnnnnnnnnnnnnnnnnnnnnnnnnnnnnnnnnnnnnnnnnnnnnnnnnnnnnnnnnnnnnnnnnnnnnnnnnnnnnnnnnnnnnnnnnnnnnnnnnnnnnnnnnnnnnnnnnnnnnnnnnnnnnnnnnnnnnnnnnnnnnnnnnnnnnnnnnnnnnnnnnnnnnnnnnnnnnnnnnnnnnnnnnnnnnnnnnnnnnnnnnnnnnnnnnnnnnnnnnnnnnnnnnnnnnnnnnnnnnnnnnnnnnnnnnnnnnnnnnnnnnnnnnnnnnnnnnnnnnnnnnnnnnnnnnnnnnnnnnnnnnnnnnnnnnnnnnnnnnnnnnnnnnnnnnnnnnnnnnnnnnnnnnnnnnnnnnnnnnnnnnnnnnnnnnnnnnnnnnnnnnnnnnnnnnnnnnnnnnnnnnnnnnnnnnnnnnnnnnnnnnnnnnnnnnnnnnnnnnnnnnnnnnnnnnnnnnnnnnnnnnnnnnnnnnnnnnnnnnnnnnnnnnnnnnnnnnnnnnnnnnnnnnnnnnnnnnnnnnnnnnnnnnnnnnnnnnnnnnnnnnnnnnnnnnnnnnnnnnnnnnnnnnnnnnnnnnnnnnnnnnnnnnnnnnnnnnnnnnnnnnnnnnnnnnnnnnnnnnnnnnnnnnnnnnnnnnnnnnnnnnnnnnnnnnnnnnnnnnnnnnnnnnnnnnnnnnnnnnnnnnnnnnnnnnnnnnnnnnnnnnnnnnnnnnnnnnnnnnnnnnnnnnnnnnnnnnnnnnnnnnnnnnnnnnnnnnnnnnnnnnnnnnnnnnnnnnnnnnnnnnnnnnnnnnnnnnnnnnnnnnnnnnnnnnnnnnnnnnnnnnnnnnnnnnnnnnnnnnnnnnnnnnnnnnnnnnnnnnnnnnnnnnnnnnnnnnnnnnnnnnnnnnnnnnnnnnnnnnnnnnnnnnnnnnnnnnnnnnnnnnnnnnnnnnnnnnnnnnnnnnnnnnnnnnnnnnnnnnnnnnnnnnnnnnnnnnnnnnnnnnnnnnnnnnnnnnnnnnnnnnnnnnnnnnnnnnnnnnnnnnnnnnnnnnnnnnnnnnnnnnnnnnnnnnnnnnnnnnnnnnnnnnnnnnnnnnnnnnnnnnnnnnnnnnnnnnnnnnnnnnnnnnnnnnnnnnnnnnnnnnnnnnnnnnnnnnnnnnnnnnnnnnnnnnnnnnnnnnnnnnnnnnnnnnnnnnnnnnnnnnnnnnnnnnnnnnnnnnnnnnnnnnnnnnnnnnnnnnnnnnnnnnnnnnnnnnnnnnnnnnnnnnnnnnnnnnnnnnnnnnnnnnnnnnnnnnnnnnnnnnnnnnnnnnnnnnnnnnnnnnnnnnnnnnnnnnnnnnnnnnnnnnnnnnnnnnnnnnnnnnnnnnnnnnnnnnnnnnnnnnnnnnnnnnnnnnnnnnnnnnnnnnnnnnnnnnnnnnnnnnnnnnnnnnnnnnnnnnnnnnnnnnnnnnnnnnnnnnnnnnnnnnnnnnnnnnnnnnnnnnnnnnnnnnnnnnnnnnnnnnnnnnnnnnnnnnnnnnnnnnnnnnnnnnnnnnnnnnnnnnnnnnnnnnnnnnnnnnnnnnnnnnnnnnnnnnnnnnnnnnnnnnnnnnnnnnnnnnnnnnnnnnnnnnnnnnnnnnnnnnnnnnnnnnnnnnnnnnnnnnnnnnnnnnnnnnnnnnnnnnnnnnnnnnnnnnnnnnnnnnnnnnnnnnnnnnnnnnnnnnnnnnnnnnnnnnnnnnnnnnnnnnnnnnnnnnnnnnnnnnnnnnnnnnnnnnnnnnnnnnnnnnnnnnnnnnnnnnnnnnnnnnnnnnnnnnnnnnnnnnnnnnnnnnnnnnnnnnnnnnnnnnnnnnnnnnnnnnnnnnnnnnnnnnnnnnnnnnnnnnnnnnnnnnnnnnnnnnnnnnnnnnnnnnnnnnnnnnnnnnnnnnnnnnnnnnnnnnnnnnnnnnnnnnnnnnnnnnnnnnnnnnnnnnnnnnnnnnnnnnnnnnnnnnnnnnnnnnnnnnnnnnnnnnnnnnnnnnnnnnnnnnnnnnnnnnnnnnnnnnnnnnnnnnnnnnnnnnnnnnnnnnnnnnnnnnnnnnnnnnnnnnnnnnnnnnnnnnnnnnnnnnnnnnnnnnnnnnnnnnnnnnnnnnnnnnnnnnnnnnnnnnnnnnnnnnnnnnnnnnnnnnnnnnnnnnnnnnnnnnnnnnnnnnnnnnnnnnnnnnnnnnnnnnnnnnnnnnnnnnnnnnnnnnnnnnnnnnnnnnnnnnnnnnnnnnnnnnnnnnnnnnnnnnnnnnnnnnnnnnnnnnnnnnnnnnnnnnnnnnnnnnnnnnnnnnnnnnnnnnnnnnnnnnnnnnnnnnnnnnnnnnnnnnnnnnnnnnnnnnnnnnnnnnnnnnnnnnnnnnnnnnnnnnnnnnnnnnnnnnnnnnnnnnnnnnnnggcgggggggggggggtagtgggctttggtataattctggttttgtccgatcttgttattgagtacattgaggctactattgcctgggcgggaataactgtttccataaagcaagggtgcccaacgggaattatttcgcatgtgtaaatggtcgcccaaaaaatggaacattgagtagtattagcaggcgatgtctgaatttgttccccggaaaaaacctcgtggttgtaatacatagttcagtccgatacccgtgacccttgctggacatacatgccatcgaatcactacccttgatctatgtactctgtcataggaaggatctgccgtgaaacgaaaataggcattgcagatatgaaaccacacaaagagagaaagaagacatcaaaagttcgtaggtgaaacaagtcgaaacgcaaccgtataaaagctcaaatctgcgttcattaaacaaattctcaaataataaacccatattcccttcctaagaagtcgagcgcgaaggaaaataacaatatcctgtaacaaaattcaatgggcaggaccccgccgtttcatctttcgccatattcgtttgtagatcgttacttcttttggaaagatttgccaaagaaaagcgcgtatgaagaaatcgaaaagaccccatcagctaatggtaaccctcttgaggagcctgctcgtggatgtttccgcgccaacctttggatgtcagttaatatcaggatcaagataccacaataactcacctccgccaccgccatacccagagtttgggccaccacctataattaattagcaaagcaacaagaaagaagaatcaaaaactaaccatagccgccgggaccagctacgccataaccagcgggaccgctaggagcgtagttgctgtacccacggttgtagggcccaccgtatccaccggcagcggcaggaccgttattgtacccgccgtgattgtgattgtagccaccgtaaacaccaccaccaccaccaccaccgtggtaactagattgaggctgggcattgtatccaccacgaccgtggaagccagcatcctggcgttgtgggcgatcaaacgccttgtcaacgcgaatgacccgcccgtcgaatctgaacaacatatgagatcttgaactcataaaatcaatgtgaggttggatggttactcttggttgttcatagcgcccatagcagcatccgcctcggcgtcagtagcaaagcgaacaaagccgaagccgcggctgcgcaaagtcgcacggtctttcacgacaatctgtactcatggtcagtagaagcccaagatgcatgtggtgtacatcagtcaagggagactgacggcttcttgaatctcgccgaatggttggaaaccctcgcgcaaggtgtcatcgctagtatgccaagaaaggccactaaatcccatcgcagcaacggttagactggctcctaccagcacaaatgtgttctcaggtatatatacacactgaataaaaagtttagacatcgtgttagaggtgtaagagaggaagctgtaagagagacgatgctcgagctggcttgatctgaggacggagatgaatgttgaaaaaaaggagacgaccgaaagaaaaggaaggataaaaatatgaacccgtccgaattgtgagacgacagggagatcctagcggctaagaggcgagtcagcatccagtcccgtgtaacaatcacactgcgttagggcttgcacattgccggggattttccactggtcggacgccaacggcaaagtccacaacgagtaatatctatttatgcgtactctgtgctgtgtctttgtctggaatcatgactagagcgagaaaggtccgggcttagcctcaagcgtacttccaagtgggggagggatgctgcagagataaacacgccaaagccagtctcacggccctaaaccttgagctgatacaattgcgggtcgtcgggtttccagcagtcaatcagatggtatccgatgctccgtttggattggcggcacttagggcaacggcttatgtacctttgttgcccctcacttggttgaagatccgagggattctgctttgggattcatagggctggactagcacctagattctattgtgaatctatgtactccatactgagtacatagttagtccatccttcttgctccgagaaccgggatatgagtccattgatgaaagcaacataatttcgggtggagtcttcacgcgtggactgtggaattttgtcgattccccgtagcttgctccatgcctgattggtcgtatgcgtgtttatgcattgtggacttttgtcctcattcggtcgggaatcatttgaggagtgtttggcaatacagacttgagatctgcattcaattaccaccgtggatctagcctctcagttcgggccatcgtcagtctcaaagtggctttgcgcgcgcgtgcatcgggcagagagggcagtgctccgtaggcccacatgcggcttgggccgtcggccttgtacttcatgtgccgggagagatcgcaaatggcgacgatcggcactgggattgcgtctatacgatgttgacatccgtctccgataggttgatgaaggtaggtatgggagaaaagtaccgaaaatgtttgaacaaaagctattcataggtgactcaaggaacacttctcatttaagcgccgagagagagcattaaagagcaataaatgggcattaatagaaaaacaaggaaaaacgaggaaacaatgaaaagacaggaggacgaacttgagatggtcgcgctttcttcggcggtgacttggatttgtgtgctttcaggtcaccttactctgtccagttgcttcaagtctactttatttctacaaacactacccagctctctgagttctgggaactttcttgatggaaagcaataatccaatctatcattggctttccactgttgcgagccagcaacaaagtcgccatcaagatggaggcatgttgttgtcacaaagaactatgaagtctccgcgctaacatagctttagctgagaacaaggaacaagcgaaggacacagctcctgtaacgagcataccgcaaacccgcatcccattcgagatatccgataatttgcgtgtgaatggacattcagccagtaggaagagagattcaggccacaagggaacgaaagcaccgtctacttacgagaccataccacgaagtgagagtcataagagatcacgacatagctacgagataaggtccagacacaagactcgcgaggctcgctatgagtataaaggcccatcatcggctgtggagacccagtcgcagtgtcgcaaaggaagaactaggaaatcccggggcaggaagcacaccatcaatgatgacttccatgccatcaatattacaggaaacagattgacagtaagtattgttctgcaacttctcgctggatgttactcatgccaaatagttgcgcaaaaacatgaacctgggtatgtttagtaagggacggtcttcgtgcataaccaaccaccccgaaaataccccgtcaagcgctcttggaagaccaccaagcatcaagcctcataagtggaccgcagaatccgatcttgccttttccgagatgaactttctgtcccggaggaataatcccagcccgtatcccatgtcgaccgccagagacactctggatggacagaacgggagagagcaccacccacgagagctacagttcgcttaccctgcacatgactctagaatcaacaggtctcacttaggcaaccggtttcttgatgtggaacgccaacttgacgtcccagtcacgccgttgttcacatttgaaaaggcgccggtcagcgagatgtccgcagtttccggccactcttggggcacttcctccatgttccacaataaaagaagaaagacatcaaaacagtcatcatcaattccatacacctgggctgagactgaggtcgaccccacggaacaaatcgatgccctcgaacaacacctgctgagcctgctgcatgtcggggtatatccccaagcgctatgctctaatatcacaaatactgtctcggggagacggtattggagtctcgctgaattatgggaattgttgaaggagagaaaggcatcatggtcaaacgaagccggcaacaaaaagcgaacttcacccgaagccaacatggggcaggtagctgcatccgaagccgttccacaggagattcccgagatcgttgcatcagacactttggatcttgccaatgtcagcagtgtacaaaatgaaatatccgaacaatccccagattcgaatgtcgcttgcgaaacggtccgcagtgtgaataacagaccacaacaacaacctccaattctcgaacaacaacaagaccgaccatgtcaagcttcagatagaccggactgtctaaaccaccaagttgccatgatatcaaacatcccagatcgatccatagatatctggggtgaagatcagtgcgagcctttctctcacgaatcgggagagcatgcagtattgtttcccgcatttgcaccggaggtcaaacagccgcatatatctgacattgaattttatgagctagatcgagttgatgatgatgatgagttctatcgcacgctggatgctgcttactgcgccatcgttcgccctgaggttgcggcaggagttgcatcaaacttacagcggtcacttgaatcccccgaacttggcaataatattccgaatagtccagaatcgactggcattcgagactatgatattcctacccgacaagcagaagcaggagaactagaacatctcgcaacggtctcccaggataccatagaagagcggtatgatgagtggccagcgaagccttctcatcaaaacaaaccacccacgagtcattcgaactatcctggtgttgacccaaacaatgatatgccatggctcactactggatacggcaagccactaactgggaacgacgcgcaacagagtcagcacccagaaatacctgacttctggcgacagaacaaactctactgatcttcaccggcaaggtggttattaactggatagtcgaacgtgtcaatagcaagcttggccacatttgcatcaatcaaccatatcaaagcgaagtagcgccatcttcatgtacatacctcgctagcttgagttcggccgggaatagagattgtgagcaccttgaattcaagatagcattagggtaaccccccctccggacttgtatgatcagaccacacatgtattgtagtaacaaaacacattcccattgtcagacagaaattccagtatcgtgaagcccgaagcattcctacttcaaacgttccgaaattggcttcatggctccttcccaaaccttggaagttccccgtgtaaacaaagaaggcaaacaatgtaaactggaaggtgtgacattgatattgacagggcaggtgcacgagggacctgtcgcactccaggaaggcacgtgggtttggaatataaaaggacccttccccccatttctcttcttctcttcttcttctctcctccccatctctctggccaccatctctccgtccaccccccctcccctccccctccccttcccctcnnnnnnnnnnnnnnnnnnnnnnnnnnnnnnnnnnnnnnnnnnnnnnnnnnnnnnnnnnnnnnnnnnnnnnnnnnnnnnnnnnnnnnnnnnnnnnnnnnnnnnnnnnnnnnnnnnnnnnnnnnnnnnnnnnnnnnnnnnnnnnnnnnnnnnnnnnnnnnnnnnnnnnnnnnnnnnnnnnnnnnnnnnnnnnnnnnnnnnnnnnnnnnnnnnnnnnnnnnnnnnnnnnnnnnnnnnnnnnnnnnnnnnnnnnnnnnnnnnnnnnnnnnnnnnnnnnnnnnnnnnnnnnnnnnnnnnnnnnnnnnnnnnnnnnnnnnnnnnnnnnnnnnnnnnnnnnnnnnnnnnnnnnnnnnnnnnnnnnnnnnnnnnnnnnnnnctcatgctgcttaacctaccacagggatcataacattaccatgtttgttatgaggtctatgtaggtctgcatcaaataacaaaccgagctttctcgtggaagttcctgaagtcgtggctctcattgccatttgacaagtcccacggaatacatgtagatagccataaccgagttgaactcctagacttgatctctccacgtattccaatgtcttgtttgtctcacataatcgttcgcgctgaggtcctcgcagatggttctaacacgacgtgatccctctcgaacgcgtaaacaaaggtctctgctgcgctacacttgccttggtgctgaccagatgtggtgactcttctatttgtaacaataattgggctaatcgagcaaaggatttgactcaaatgcagttcagctcagtcgggttcttcaacatgccaccacaaactgccagtcaatgatttagaaagcacactggcgctggtttatgagagttgatgaattcattgggtatataacagtcttggacagagaaattgaacacatcatcagatggctcaaatccagaactttgtctctattgaagttgacctatccataaatctcactgttggacgaagaacaatcgcgaaacacgagagatcggaaacgaggtctccgtgcaacgccagatacaaccaacgcaaaagatgttgggagttgaattcgataaggcaatcttgtagcttttaagtcgtggatatgttgcggagtccacgaaaataagtcgggtcggttttgtaaagggattggaacgctgagaggtggggcggttgacaatgacacgcttgataaaaatgacatgcagcaagtgcttgcaaggcgattgggactataatctatcatagagtcgcagccgcctcgaccacacccgctgctttgaatgcgcccgggttctgcatcaccacctcaacggggaacttccactccatgaatcgcgtccaacctaaaataccagcccattagcatgttatcctctcgcacagcaagatcgggaagcttgttggtgtcacatactccaatatgcgcatcgtcgtcccaggtatttcccaaggaagggtaccaggaccatactcagaagcagctccagttgttcaatgctttcctgccattctgcctcggcatcggatgaatattccgacaaggtatcgaggtcggagtcgtttgtagattctgaagggagagaggcgagctcatcgtcggactgggactgggagtatgaggattgtcgggagggaaccatgtacgcggacatcgagaaggagggattcgagctgtcttgagagaaagacatgatggagattgttgtaaagagaggtggggttgagtgaatgaggggaagcgatgttgatcaagcagcggcctgcctactgcggttctacgtaaacgtgagagcagcctggactgtttcccttgatcgaccggcaccgccaagctccgtaattaaacacgtgaccgtgtaatctggtgactcacttggcggtcacgtgccaataccgcgataacagaattgccttcagacctggcgatatcagattccagcgacaattttgccatctgacactcttgctctagctcctcgaattcgcaacaacctgatctcatctctaacagattgtggtggagtgaatagcatctttgaagcctacaaacatggcggacgctgtacgtcacacccttgtctttttaccgaccctcccacattttctttaagtctgcacaatatcgacccctcggccgccaaccactctgatccaagaacgcacatcgtttagccgggttcaaggactggtacttttattgaaaagccaggctatacgatttcttctgctatttctctttttactcagaactaacaccgctttttgccgctccgctcaggaactcgaaactaaacagcgcaagtcggtcgcattcagcgaaggatcggtcatcatggataccaatggccaagtcacagatgctcctccggctgaggctcctacagccggtatgcaatagctctccgatcccagcagtcccccagtcgcctttgccacagccccactaacgatgtcttgaatatacagagaaggatgtcgacgaggtcaccgagatgttcaagggtctctcaaaaaagaagaagtcctccaagaagtctaagaccaccgaagccggcgatgacgacgaagcccccgccgccgccgacggcgagttcgatccctctgcgctgaagaagaaaaagaagggcagcagcaagtctaagaaggccgaccccaacgacttcgatgccaagctcgctgaggctggtattgctgaggaggctggcgaggatcagcctgaggagctccccgagggcgaccttgaggccggcaccggtatctgggctcacgacgccacacaacccatcccctactcgctcctcgtctcccgcttcttctccctcatcgagagccaccaccccgaccttctgtccagcggcgccaagtcctacaagattcccccgccccagtgccttcgtgaaggtaaccgtcgtaccattttcgccaacattgccgatatctgcaagcgcatgaagcgaaggttcgctatctcccacctatgtactcgttgaaatttcgtttaacaattttttttaaatagcgaggagcactgcacccaattcctgttcgccgaactcggtacgtcaggcagtgtcgacggtagccgccgcctggtcatcaagggaagattccaacagaagggtatcgaatcggttctgcgtcgctatattgttgagtacgtcacatgcaagacgtgccgcagccccgacaccgagctcaacaagggagagaaccgtctgtatttcgttacttgcaactcttgcgggtcccgtcgttccgtcgccgccatcaagaccggtttccggtcccagatcggccgcagaaagcgtgtgggctaagcggtggagctgtgctggcaatgtgcgaaggaagggcttgttttatctcttccttatggcgtgtcacttactagagcttttgcggggtggaaacaaggcatgatgcgtttctttctgccctgagaggcttgagatgaggaaacgatttgaagaatgaaaagtagtttcgcatggaatagactgatatcactatgtcttgccttcgaggctgtatgattttgtatctagttgaacgttaggaatgtggtagaatcgcccactcttaaatttctttcttttgccttttaagccttcggtcccacgagtctgatctgctccacggggtactaattagcaagcacttgcctattttaagtctcaagctcaacatcttaaagagatatcggatactttgtttatggcccttcctatggagtaccaaggataggctcgtaggtgtgtagtatatcaaattcatttataattgtggtgatatcgctgcaaaaattcgtaaatagttccacataaatgtactgagcaaaattggtataaaatggagagcagcccgtgattgagcatatgcccggtgcaatgaagaagtatacaacaaaaccacatgatgacaacaagccagggggcatcttcgtttgttccgaaagtagatgtcaacgtataaaattcacaaaccggtctcttctgaccgaatcggcatggtagaattaaccacccttcgcagcactcaacttcatctgggcagaaaaggcattcaggtttctggtctgtaggtagacagttccaggccccgtaaacctgcaagcaagaccctcgccagaggtaacgccggagacgataccgccagaggccacacgttccatcttgtacttgcagtcccaagccacaaggtggccattgtcgacgaagtagctcatgccttcatcaagctttgcaggtgtcagataaaacccccgttgtcaaattaccgggcatgatcaacttacatctttccggatgattgcaccaaaactttgcatccaaaggatcccacttcctgtgatcttgtagatgaagaatccctcaccggagaacatacccttggatagaccttgggactggtgcttatgcccgataccagcggtatatccaagcaaggcgtcgcgtccgattttccattcctttggttcgtctacgtggagggctataatatctcccagcatggaaggtgccagcaggagctcaccaggaccggtgtagtgggacatagtcatgctgcccccaatgaggagtttcttccatgagaacgagatagttcccctcaatgtgatcgttgtagacattccaatcatggcacctaagaggcaagcaagattagctctatggcaatacatactcgggacgaagatatcgattacagcatattcgcgtacaggaattgttgaactggataacttaccaggtctgatattcaaaggacagcccattgccagctgtacggtcaagacagagttgctatctcggtggctgatcctgtaacttccaccattgaagactccagtatcatcttggttcattccacctgtcccagtgagttctccatgttctgaagcatgttctggggttcctccagacactgtttgcattgcaatggcatgattttgttcgaaagccgcttgattgtaggcgattggatcttgctgaggtggactcactggctgccttccaatagtgttattgtaattgaaggctgcttggttgtaggcgattggatcttgctgaggcggactcactggctgccttccaatagtgttattgtaattgaaagcggcttggttgtaggcgattgggtcctggggcgggctcgccgacgtcggaggggctgcatattccctacttggggtttgtcgatggggttgggggctctctgctggtggagtggctggggtatatactccatttgaaggctgctttggcggtggtggatagtagggagccgcaagcgattgtgaaaatgctaaaatatttagtaagatagcaaagacagaagaatcggattaattacaggttatatgcgccggagctagacaattagttagtaacggatttctgtagtttgtaactttgtgaaggcactcacctgtcatgggtggtggggcataatagcttgaatcttgagacattgtggtggttttgatgtcgctgaacaccaatgtctttttattctcttagaaaagtacttctagagtcaaaatccgagtgttcacaggcaaatgaagacactagggaagtcagactcgctaatatcgtcacagcaaaaactcgtagttcctcccgtattattttgcgtcaatgggaagaataatgggtatctcaatggcctggcttgatttagggaataataacaagggaaataaaaccagaccggactctacggggttttctcttttaaaggggagctagcttttcccctcaccaacagctcatactattactattcttagagaggaattccactaagagattaggcgtgtgatgaggcttgcagctcgcagtcaatcagtctcgagtcacacgcaattgtgactatgtgccaccgatcttccccaccgggcgctaaaaagaagttgcatgtgcgagagttgataggcgtgtcctatgcatgctatttaccggggatagctcattcgtcggaattatatatgcaataggccgtacatttataagtctaggtaccaagagcgacagaaaccttgcccagggctgggcaaatatgaggggttgatcggcactttgtattagcgaactcgaagccgaatagttacggagtacagaataatgcgaagaggtaacaactattaggcattatggacaagattgatacaaagcaatgttgaatttttctgctacatacaaattcctagaactaaaggtatataaggtatatatatctcacggctccttggtccccccttcagatacctggcgtaaaaaggacagtgccttagtataaccggtttgcagggcgtaatccaaagccgttttcccttgatcatcccgcaagtcaagcctggctccgttatccacgagcaactggagcatcggaatcggattcattgcaggggtagcgagtcgaagtgcattgttgcctccggcatctcgagcattgacgttcgctccttctttgatcagcaactcagccatctgaagctggttcttcatggcgactgataggagcggtgttctttggccagacccctcaatatctgcgccatgggataatagcagccggacagtatcgagactattcttttcgcatgcccaatgtaggggagtgtggccgacctcgtctagaatatcaatgtttgctccgtgctgtagaagtaatgcgacaatatcgtcctggccttcatgagcagcaattgcaagtggactgatccccgagtgttgcgctgtaatgtttgggttggctccattttgcagtagcagtcgagttccctcgagatcatgggtggaaacgagatcacttaacgcggaacaattgtttggatctatcatatcaatatctgcgccctgtcggcgaagtatgtcaagtgctcgttgagacctaatccgggctgcaaaactgtaccccatcctaacaagcataggaaggtcttcataaagctccacccatcgcagcagaaggaaatacaataaagcatggaagttgttcctgaccagccattcaaggcatgcttgttcatcctccccgtctccttcgcggtcaatgtcatcgagcttatacaacgtgagccaatctttcagtgcgtgaatcgccccttcgattttgtctgggtcttggttttgatcgtttgacccctgtagatcttccgttacattcagtgatctcaaaatgggtttgcagtattccattcctggaacattcgcagaaaggttccacgcaatccacccaagctgacgtgagaacgagttccaccattcgatacgatcatcggatacggactgttgtaagggtggcacatggttgtggacttgaaggaattcagctctgatgtcagacgtgagaagctcacatgtctgttcgaatcctattttgcgaacatctttgttgctgtccgaaagtgcccggcggcaaagaaaccccagttcatggactgatctctcaaactgggaatcgtctgatcgctggcaaatccaacggacaagcgtaaaggcacctttccaatcacctttctcgatcaaccgctccctgcgcgccctgaccttggttgagtctgcagcgagatctggtaagagatgccgatacctgaggacgggaacaatgcatagcagtgcatcctctcttgagcccaatttgctgttctcaaagcaacgtatgagatcatcaatgcgggtactagatgctaaaaatgaattttgcaattcgggaataacatcaacgtccccgcccagatcatccaagttgaggaagacctccttgaggaattgaatgtagatatcctgggctaccatagcctcgagctcattatctgtcctgacagccaggactttcccatcatagggaaggctcttgggctcgaaactgaacaggcgtgatgaattatcatatccttcagatggtactagtctcgcttccgtttgcctgaagatccatttgtaaaagtagaggaatgtttcatctttttttgcctcatcttcactcaatccaatgaggcggcaaagagttgagttctgccagttttcatctgacttataaagtgaccaagtccacaagcctagaaccgcttctagctcggcgacatccagtttccactgcagagcatcaccgcttcggatgagaccaattgaatacgttcccggagcttcagtgacagagcctggagagggtcccttgcacttaaagccaagtcggaactcaaaggtctttccgaggttaactccccaactcgacattagatccatcgtcgactcgatcgtctctgcgaggttggaggcaattcggcgaataggcattccattccagtcaacacccaggctttgtcttgagctagtcgtgagcctcgcgagctgggttctggtgtggattaattgtttggccagaggtgttccaagatggggcgtgaatctctgtgaaggcatatttggtggccgatctgggatcgaggcgagttcaaatgactctactttctcaagataaaatacaaaacaatctatctcttgctgcttgtgagacgtgaggtcccggtcgtctttcatcttattttcatctggattcattctttccgtgcgcagacaggtacgtataatagccattaggaatgttgatcccagttgagctagggtaacagatgaatggagacctctcagtccgacgaactgacatatgaatcccaaaattgtcgatatgagggtagagtaagtctccaaatacttcctgtcaaatcttcgatctctgatcgatttggtatagcggagtttgtccgtcattgaagactctggcccttcattgacggccaagaaagcattaaagacctggtcacccacgtcttgattaccgggctgcagccagtatatcttgcttggcttttctgctttgagatagaactcctttgaggaacgttccatgatgaatgcgcagaagaacattccgagaaacagaagggttgtcccgattatatagagcgggaatgcgtatggagcgacagctttatcgtttttctggaaatgctgaggatacacaaacaccgtgagtgtagcaaaaacaacagtgcctttttggatcgtcagcatcatttcaggctcaagggaggagaagcactgaccagtctgcagtataccaccaagtattgcagcacaatgaaaccaaaattgatctctccttttgattcccttgttcaatgacagattaggcatgtccagttcaggcaagtcagtaggtgaaactttgctattgcaagaccaagccttttcttcaagagcatctctcaaagtgccaatcttcgtctccttttctccggtggtcttgtctacatcctcccaagcaactatctccacgatcttgggccggccaaagactcgtgtaatgccgccatcgttgaaaacctccgcagtggactccgagacacaaggaagcagctcgctttcagcttcagcaggaccttcttgtgctcgtccgacaaatgccctgagggaagaacttccacagaccctgatcaccgacacgacggcagtcaaaacccctagtggtgaaagggcgaatattacattatcaagagtgcttatggactcggagaggaattgtttcgtaagtcgttcgccgaacaaggtgatcaaaggagccttgaagataaacatcagcacatccacttgaggcctcaatataaacataaacataccaagtccgtagcaagattattcgtgaaatcatcccaatcatcatcagccttgacaaaaggtaacaaggatagtaaaaacagtatagaaagaatcatagaaaacatcataaatcatcaacatcaacacatcaattcgtaataaaatagattataaaacagcactcagagaataccctccagcatggccgaaggcgcgctctcttaaagaaaacacccctccatcatcctgcgctatcgatgggcatcttttgccgatcctcactcgatttagagcgaagtacagagcccccatgcttgccccatgacaataatagaacgccaactaatgatatcaagaacactatgaacatggctttaatcttgtcggggtatgaaacacacaaggctagtgcgggcgcgtaagcgctgctgcgctggtgagtgtccccgttgtcactgcactagttgcggcccgcattgcgctatatcacggactgcgggtctggacggggcttttcttggaccggcgcgtaacttaccttgcacataggtggcttagagggttgatatggatatatataggatgtctgttatgcgggggacgttagtagcgtggaacagttcgttgtcgggatatcaatgttttcttggcgccttcagtccttattgtggcactctgggatgcgacatgtatcaaatttgggcaaagacgaggagacagacaaatctagggttgggaatatacgctcttcccctgcaatagggccggggtgtggaacatgtgtaaatcaacggaaattgtggctatggcaaccatatggtctaccttggcagggtgacgatggtggcatcattgcaggcaaatagagactttgactcttatcaaatggtggagatttcaagatattggccctgctcaagtcggattttcgtgttgtataatgaactccgtgtgatgtgaggtgaagatcgatttctctgcttatgtatattttttgattcatcaaatccaaaaaaaaaaagtgctgacaggatataaaggcaattcaatctattatgttgaatcagatggaatcagtgaatgttcacagccctgtggagttgatgtaaatgttaagtcaatgtccggggcggagcttctgagatcttggccagatgatttaggctactcgataacacccgacctcaacacccactctcccgactccccctactatcgtttctgtctacttctcttggttctaccatcgttcccttcaatacataccatccgtgtcctttcacaatggcgcccactgtcaagttcgcgtctgctatgaccacccggtcgctccgcatggtccggacggtatggctttccggcttcctgttcctgaaatgcgaccgaaacactaattccacatcatccaggaactagaattccttgccgatgcctctgtgatcactcccaaccagctctcaaccattctatcacagttgcccgccgattccgaggtctctcgggcgttgcaggcatcaccatcggagcaggcacagcctgcgcctgttcaacaagttccagtacaagcgcagccacctccagctccatacagcaacacgccctcatactcggctcccgtctcacaaatgtccaatatgtcggtgaacgagaaagccgcgctgaacaatcaatatgccagcccgccccctcaggcgccgccttcttatctccaagccccgccgctccgtctggcggtggccatgtacgaattcaaatctaccgacccgggtgacctggacctgaagccgcatgatcgtgtccagattactgaggaaataaacgcgcactgtatgttctccttctattggatatggaaacaaagctgactagtgattaatagggtggcgtggtcgcaatgagcgaactggtcaggagggtatcttccctggaagttacgtggatgaaaaagctgcgcttgcttcgcccccgccccagtctacagactatggaaacatgcctcttgcggtcagccagagtggacagcccgaaaaccccgaggacccaaagaagaacaagttcgaggaaggaggcaagaagttcggaaagaaactgggcaatgccggtacgtcttatatacttttggtactcgttatttggtttctaacttgatattagcaatcttcggtgccggtgctactgttggctccaacatcgtgaacagcatcttctaatcatgcggccgggcaattttgctgggcattttgtttcttattcactctcattgatacggtgttggtggcttgggttttgcttctaatggattggctaggctcaatcacgtcgcttattggcggacttatgtccagaaatttcaggatccccagtgttcagatcctacttagctcttcattgcgatagatcacttagggctacacacatacttacctcaaccaatgactttcctgatattttggggccacctcataattgacctagagcttgaatttcagagcaacaaagatcttacctttctagcacgcaatggaagccaaacgaaagagcataggcaatattccgttacaggcttacccccatgactctgacatgcagcaaaaaaaaaaaaaaagaggatagaaagcataagttcgggttgggaatgacattctgctttttggttattcttctacttcttgtgtgggctatagaatccagactgaacttcgagatacatgatttcatgttgttatatagaaagtatgtaaatgacaagcaacgaaaaggaacatttgaatatctatcccttatacgtgtcatcaaccagccctagagtctgaagatctaacttgtctattgatgggctacacattaatgtacaacatacgatgagcaaggaggctaagcctaacctggtgcccgatcagccccatcgtggggacctgggttgaagactcattgtgactcttgtgcttacttcggtataatatagcgtctgagaatggcgattggttattgaatgcatattctgttgctcttctcctatgatatcagtgattagggctaggaatgcgcacacaaggccgtatgacatcaagttgtgggtcaagtagcatcattgtcttgccgatggcttaaagcggactatatcagtatgttttatatacaaattaccggggatacagtactgttgaagactatataaactttccttaacctcatattgtcgataggagtcttgaatatatgaaatagtgtgtataattgcaagtagctgtggcaatgtggtgggaactgccgatgagcatagcgaactccaaagacccattgtacatagcccgtatgtacaaaatagacaaaaccctacaaactgcgaacagccatacagagctgatagaagtagcaaatgatttcaaatctaaaagagagccgagccacaacgaacaagagtaagacgcctttgacccagatacccactaggcccaatccggaatagcgcattctcccctccctcgagaagcttctgtgtcatcgatataaattgcatttctctctttaccctcacacgaccaacgtcatctctctccacgcccagctctattcctaccaaacccaaccacccaaaccaccaaatccaacctcatttcaaaatgtctgactgggaaagcaccaccaagattggcagcaagttccgcggagcaggcgctcaaccccgcgaggtcgtcgtcaagggcaagagtgccctgaacgctgcccagcgctctggcggtgtcatcaccgagaagaagtacaccaccggtaacatcgtatgtgaagtttccttcgaatccgggagaaacaccatgaatgtaggctaacccactctcaagagtgccaaggcaggcgcccccgaaggccaacacttgaccaaggtcgaccgcagcgacgacatcgtcaagcccaagaccatcggccacgccgtcgctgatgctatcaagagacgtcgcacagaggagggctacaagatgacccagaaggaactcgccaccaagtgcaacaccactatcaccattgtccaggacttcgagcgtggaaccgccgctcccgaccagaaggttctcggagccatggagcgtgtgctgaacattaagctgcgtggctcagacatcggctctgaaaagttccccaagaagaaatagacgggatttagtccgtggcctttatcccttccgggatgggaccggggcaaatctcaagttttctgcatttgctttttttgcgctctatgactgtcatgttccttctccttttcatgagacgtcactttttttttattttttttctacgggtttcttttctgctggtcggattagcgctggccttgcatgggaaacgggtttagagaagatatcacgaaaaaaaattgtataaatgagatacctcggattttgatatttatcatctggttttcttagaaacttgtagttggcatccaagtgtaaatttgaatacggagtagatggatgttgttctcatacttagcgcatcatccatgccatgcgatatatatatgcagtggggtaaatatactccttccctatacgagggactatgccaatccctgctctgctccatccagctgaactgtcagaacgtaatttgaagatttgcaaagctttgatttcgtctattgacccgatttcatctcttttgcggaggaccaggacagacataagagctcaaaaaaagaaccatgtcatctttttattaaacaaagacacaaacacaaggtaccaactccgattgatcatggaatcaatgaaatgagaaaatcgtggaccggaaggtcatcccattccgtatgcgggactcggggaatttgtcccaagtcttttcgcctcgtaaacacatacacacgacgcatcccaactttcttcaccacatcccctatttacttccgcgcttgctcccgctcgacctcgtacatgaagtcgaagtatgccttgtcaaagtggtggacacggacgtatccgtcctcaccaccggaggcgtatgcggtgcctgcggggtgaacatcgatggtgttaaggggaccgaaatggccacgaacgcggccgcattcatcttcgaacacctgagtaataagattgttagtatataagttaagtcgtttgaatgcatatttgtactcactctgtggtagaatcgtgcctcgaatttaccctggcgggcggaggtggtagtaacatccatggcggcttgaccaccacccagaatgacaaagtccttcttcggtgtcacgctagcagtgttgagaggagtgtcggaaatataggttttgaggatggcgaggttgcgggaggacaggagctgcataatattagccgggggttgcctaatagaataatctgcaaaaggaagaacgtaccttagctgacttgtctttcgacgcagtaatgaaagacaagcgatcaggcgcgaactgaatgtcagttatttggctgtcgaattcgtgaatctgcacgttctcgacttgttctccagactaaagatggtattagtatcccacattcctccaaccacctcaaaaaaacataccttaggatcatactggctgacgctgccgtcctcgtgccccgcaatgatgtacttgcccaggaaactccaccccgccacggtagccttgctctcctcacaaacgatggtcaaggtaggctcggtggcctgcgcgctaaggttttcgccgtagttgatatcgagaacggcgatagtaccattgaaacccatgcgcttttccgtcacggccaaaagtctgcttccatcgggggagaatgccacgcgcttcacggctgtcgagaactcccacaccttaacacactcgccggtcttgacgttccatagacgcacggtgttgtctgctgatccggttgcaagaagaatggtgttggggctgacgtcgactgtccagacagcaccctggtggccgttgtaggtaccgagacgctcgccgttggcggaccaccatgcgcacacaatcttatccttcgagacggagaagaggagatcgccgtcgctgttgaacttgatctgggtcagggaccgctcctgttgttatagttggctgcggtcagtctctgtggatccagcaagatttcgaggaagtcaacgcacatggccggaaagcaaaatggggcgcatttcgaagggtgaggtgataggaaattcgagatggagtatcggaggggaaaaatctgagacgctcggctcagaaggggtaaggcggagtggcttttttgggggggtcaacctcgtcaacctcactttctttgactagtgaatttcatcgcacactcggccctcaatgccaagcctttatcggaggccaacatattccgcattccggtatctacacgtgactactatctgtctaccctgagccctaactaggattcccgaaaaggttaatgcggctgagatttatttatgcctcaggcagaacaaacaaatacaatatctccggagtcacgtgctttcgggaaaccgggaaactcccggactctccgcacgagcttaattaccgaaaaaaaaagagatgaagtgaatctgagggaaatatctcaaaattgacagggctggctttaacctcagtatatctcttgagcgttgcaggtgaaaccaaggcctaattgttgatttcttctcgcaacgccggtaccaactccgcgggttcgccccaaacaagcaataattcatgccattcgtccccgctgccctaccccgctgcactttttatctccaagtgcatgggggtattctccgaaaacttcctatcctatcccgttctttgctccatacctcttcctcgatccaaggagtcagacggcttcgttcattgtccattgagtctccagtgaacgccgatttttctcttatcagctccgctatctcaccactccgaaagttttccgggtcagcaatggctgccgcgaagattgatggcactgccatcgcgaagagtattcgccaagggttgaagtccgagatcgagcagattcaagtgacgaaccccagattcaagccaaatctggttatcttccagggtaagcgtgacccgctccgagcatgaatacatgtaatgtagtgttgaatactaacatgacgattcttatctagtcggcaatcggtcggattcaagttggtttacctacgaatagtattgaagatcttgcggactaattttacttaggcacctatgtgcgcatgaagctgaaggccgcccaggaggtatgactcgttgttcgggatatccgaggcattctctgaccttattcctaggccaacatcatctgcaccgtgatcaatgttcccgaatcgagcaccgagttggagctcatccaagagatcaccaaagccaacaatgaccccgctgtccacggtatcctcgttcaattgcccgtcccaagccacatgtccgagcatgcggtcacgtcgagtgttgcagatgagaaagatgttgatggtttcggcgcaatcaatatcggcgagctggcgaagcgaggcggtcgcccgttgttcactccgtgcacccctctcgcggttatggaactactcaaggcaagcggcgtagaccccgccggtaaggaggcagtggtactgggacggagtgacatcgtcggcagtccggtcagctatttgcttaagaacgccgatgctaccgttactgtctgccactcaaagacaccggatattgcgcgcattgtcaagaccgccgacattgttgtagcggccattggccaaaccgagcttgtgaagggtgaatggttgaagcccggtgctgtagttattgatgtcggtatcaattacaagcctgatgcgactaagaagtccggtgagcgactggttggcgacgtggactttgagtctgcttcccaggtggcctcacaaatcacccccgtccccggtggtgttggtcctatgacagtggctatgttgttgaagaacgtggtgggtgccacaaagtgctacttcgagaaacagaaggaccgccacgtcactcctcttcccattcgcatactaaatcccgtgccttccgacattgctatctcgcgggcccagtaccccaagcccatcacccaggttgccaccgaggtcggcattgcccctcatgagttggagccctacggccacaccaaggccaagattagtctgagtgtgctggaacgcctctcccatcgccgcaacggaagatacatcttggtttgcggtatcacacccacccctcttggtgagggcaagtccactaccacactaggtctcactcaagcacttggtgcccacctgaaccgcatttcctttgccaacgtccgacagcccagccaaggccccacattcggcatcaagggtggtgctgctggtggaggctacagtcaggttattcctatggacgagttcaatctccacctcacgggtgacatccacgccatcaccgccgcgaacaaccttctcgctgcggctattgagactcgcatgttccacgagtccacccagaaagatgcagctctctacaagcgtcttgtccctgccagcaagggcaagcgtgaattcaagcccatcatgttccgacgtctgaagaagctgggcattgagaagaccaacccagacgatctcactgaggaggaaatcacccgctttgcccgcctagatatcgacccagagaccatcacttggcgccgtgttctcgatgtcaatgaccgtcatctacgtggtatcactgtcggccaggcccctaccgagaagggcctgtctcgtgagactggcttcgatatctccgtcgctagtgagtgcatggccattcttgccttgagtaacgatttggcggatatgcgtgagcgactgggccgtatggttgttgctacttctagaagcggcgaccccgtgacttgcgacgacattggtgccggtggtgcccttgccgccttgatgaaggatgccattaagccaaatttgatgcagagtttggaaggcactcctgtgatggtgcacgctggtccctttgccaacatcagtattggcgccagctctgccatcgccgataagcttgccctgaagcttgccggtaccgagcctgatgaggaccatgaagccaagaccggtttcgtggtcaccgaggctggcttcgacttcacaatgggtggtgagcgcttctttaacatcaagtgccgctcctctggtctggttccggacaccgtcgttattgtggctactgtccgtgcgctgaaggttcacggcggcggccccgagatcaagcccggtgcccctctgcaggaggtctaccgcaccgagaatgtggatattctccgcaagggttgtgttaacctgcggaagcacattgctaacgccaagctgcacggcgtcccggtggtggtggctatcaataagttcgacaccgataccgaggctgaaattgctgtcatcaaggaggaggcgatcgccgctggtgccgaggatgccgtccctgccaaccattgggctgagggtggagccggcgctgttgatctggccaaggctgtcataaccgccagctccaaggagaaggacttccggctcctctacgacctggatggtactatccaggagcgcatcgagcgcatcggccaggccatgtatggcgctgagaaggttgagttcagtgaattggctcagaagaaggtcgacgcctacaccaagcaaggattcgcgaacctgccgatctgtatcgccaagactcagtactcactcagtcacgacccagccctcaagggtgcccccaccggcttcactgtgcccattcgggatgtcagattggccgtgggcgctggatacctgtaagtttttatccccgcattttgtgggaattcgtcacgctaacatagctatagctacgctctggccgccgatatccagaccattcccggactacccactgcccccggctaccttaatgtggatatcgaccccgagactggcgatattgacgggctgttctaggttacgatatagatagaggacatatttggagcttgcatataccactgttcgaatttcgattcttcaacacatacaattggcgtctgatagttagggcccttagatggatttttcaacaccgcgcaatccggggcaattggacacgcgaaattcatcccgacatattatttcataatcaataacatttttttctctctgaatatagatcgtacaattcggttggagctcttccggggtcaaaaagagggccggtcaatggccggagttgagctccgttctccgggaaccgctttaccaccgcgtatagacttcttcagcgggtcgattgatggagctttgaggtaaaaaaattggaaattttacctgagaaaggattagatcgatgactcaggacacttggaagagaaagatataaagaaaaagaaaagtccacgtgaaattgtcctaaaacattcccaaaccaaaatatccttgatatctcgtgaccgtccggcttcggcgcttcttcttgcggaactgttcataaagtcgccaacctccattacaccggacaaggctttttcctcttccactccttcgaaccctccagtttccttgctattcggtaattatcccttggcttactgccttcctggtcttattccgatcaattcccgtattgccccggtgccttaaccccccacgtacacccccatccccgaagtcgcatcttctgtcaaccgggaaatttcccgactccacatcttcctttctgccgaacctcattccctcggtagtaaaccagcgagtgaggcgactcgcattccacccagccaaacagaaactgtgaaactagcgctgacgtctttagccactatcccacgatgaacgctctccggtctagttccgcactcgctcgtcggtccctcgcgacccctcctgcccctctctctcccacttcccgtcttatttcttcctcttctttcacttccttactttctaagagatctatctcctctacctctctttcccaacaaactaatcgagttgttgcttgttcccgctggtccggatcgatcccctcgtctttcactcaaacccgcactatggcttccgaaaccaagattaaggtcaagacccctgtggtcgagttggatggtgatgaggtatgggacaacccccccttttatagttcaagctttcgatcagctggcttcacaaacccgcgtattctcgtgcttggctgccgcattttcgtcgaaaacgcggggaatcacggggaattttacgataattcatgtgtcaggccgacgattatgccgcccaaggcattgaagctagacattggcatgtgctaactggacgatcttccttaacatagatgacccgtattatctggcaagacatccgtaacaaggtaagcctatcgtcccatcctcgctcgggtcagacctagatgatcgcccaccccggttagttctcgatactaatgatctgcctatagttgatcctgcctttcctcgatatcgacctcaagtactacgatttgggtatcgagtaccgtgatcagaccaatgatcaggtcaccattgactccgccgaggctattaagaagtacggtgtcggtgtcaagtgcgccaccatcacccccgatgaggcccgtgttgaggagttcaagctgaagaagagtaagctcatcaatggaagtttgtatcgtgtaacactaaagctaaccatctctagtgtggctctcccccaacggcactatccgtaacattctgtgagtaagctcaatctaactggctttgaccatcactaataagctatctagtggcggtaccgtgttccgtgagcccattatcattccccgcgttccccgcctggtccctggctggaccaagcctattattattggccgtcacgccttcggtgaccagtaccgtgcccaggaccgtgtcatccccggtcctggtaagctccagttggtctacacccctaccggtggagagcccgagtacctccaggtctacgatttcgagggtggtggtgtcgctcagtgccagtacaacaccgatgattccatcgctggcttcgcccactcctctttcaagatggctctcagcaagggtcttcccctctacatgagcaccaagaacactatcctcaagaagtacgatggtcgcttcaaggacatcttccaggagatctacgaaaaggagtacaagaaggacttcgaggccaagaagatctggtacgagcaccgtctcattgacgacatggtcgcccagatgatcaagtccgagggtggcttcgtcatggctcttaagagtaagtttttccgtctatcttgtgttagtttatcttatctaacgtatgttcagactacgacggtgatgtccagtccgatatcgtcgcccaaggattcggctctctcggtctgatgacctccactctgagcacccccgatggtaaggccttcgagtccgaggccgcccacggaaccgtgacccgtcactaccgtgagcaccagaagggtaacgagacctccaccaaccccattgcctccatcttcgcctggacccgtggtcttgtccagcgtggtgagctcgacaacacccctgatgttgttgccttcgccgaggagctcgagcgcgcctgtattgatgtcgtcaacgacgaggctatcatgactaaggatttggctctcgcctgtggccgcaaggaccgcgaggcttgggtcaccaccagcgagtacatggctgccgttgagcggaggctgaaggccaacctcaaggctcgcctgtagattcccatttgctgcaaaatttgatgagatactccagtcttagattccctagaaggacaggcattcgtctagcttttagccacttttgtatagtatgcaattgaattgtcattctatatattatttttcaaagtatatcgtggacaaacaggttctcaacggtagtatctaggttcctgcgcttgtttcaggtgatacagttttccattagcccggctcaaccactccctgtctacctcgctaccacaggggtaaaaagttctcctgtaccgattatgggacgtaacatataatcctcaaaacgtcactcacgccacaatctgcttggggacaaaatggaagattaacaggaatcggagtatccaaatcaggaaataatggcttcattctcctagccgaacatcaacttcaaaccctaagcaggacagcaaccatacagaacatgtcccaagtatgaagcaaacaaggatcttccacctgataatgtgatatctatcccaaagccgtggtaactttctctaaagttacgggaggtcgttaccgaacaatcaccaaaaacctagaaccaattagggtatgattcggagatgtgggatccataactctattcggacagccaatcatatcctctgattttagttagccatcgacctagatcgaggtcttgacgcaagtggttatcgtcgcttcccaatgcggccaattcctcttttcgacggtcaaaccaactctcatacagggaacttgattggaagactaggggctcgggtgaaaactcctgccaatctggctgtcaaactcgtttgttcgtcacagggtagccggcgccagatagatctgggttaagacaggcgttttctttcttcctttcttctaaccttctacttgggattggaattgcacttctttacttgaaataagactacctaccaataatcacccgctgtgtgatggcggtgctgttctactacattccgttgaatacgatgccacacgtctacggcggtctccattaggattttgctggtatcttcgagacttgtcaattggtccttgccggtcgaatgtacgttgtggccatctcgtcggtctttacggggctggcggttctggttgttgccctgcggttatacactcggatccacctggtgaaggctcctggactggacgatttgattatatttgttgcattggtatgtattctcatatgatatgtacaccacgagtgcacgcgtccgggagacggagtgtatggaaagtgagaacccaatactaatcatccaatacagctcgtcgacgtggcattctatacctttacgatgcttggtaagtggtctactccaacaacacctcgactgaaatatacctgaatctaacaaattcctccatagaacgattatacggcatcgggatccgcgcatcagaactctctgaatatgacatcgagcgccaactatttgtacggcaaaagtcccttccgccatcgaatggaacaagccactaatgaaaaccaatcacagtggttgtggctttcggtccctttttacaacatgactatgatcctagccaaattctccgcactcacactctacgcccgcctcttcaggccccgtcgcttcctgctaatcacctacagcttaatgggcttcctcgttatcgtaggtctgtggacgagcctgagcggctttctcttctgcattcctctccacgccttctggagtccatcggcagaggttcgcgactcaaactgtctacctgccagccctgtctggttcaccaatgcggcactccagacttttaccgatctggtaatattggttctgcccctgtcgctattatggaagttacagctaccgagaagacagaagtgggggatcctggtggttttcggtcttggaatcttgtaagtcgaagtaacatagtttgtggttgatctcgggaaatgaagctgactctgcttacagtattgttggcgttagtgccgctcgcatgtatccattaagcatcatggttggcggaggagattttacgcgtaagtatataccatctctccacgtcttgcgatgcacggaatcaacaacaagactaacacaccgatagaggcaaatgccaaagcagccctttggtcctgcctcgaaacaaacgtatccatcatctgcatctgcctaccaccactccacccgctcttctctcgcatcttctcattcttcttcctccctcgaccgatccgctcaagagcctcgaggtgtcattccagcagatccccgctcaaccgggatgccgggatctggtgcaacgaactcttcagtcccggaacagcaagttactctgctagcatctccaaggtcgatacgaacgaagaggagcaagaaaaagcagaggggattcgtgttaaacgcgagctgaggatgcagtcgaatactgttccttctttttcccgtcctcagtctgcgaatggtacctatccggatatcgagatgacagaggggtcgggcagtctgaaatcgtctgagcatccatgctcgaatgctagttttgagagggatttcggtgatttcgagttccccgactataagaatcgaatgaatgctcctatttgaaattgtcgggagcttggtttgtatatatggaacataccaatgtctgggatgtgattgcatatactgatgatatgaataacgatgttgattttatgagttttattgagtcatgttcgatgcgggtggaatatttagaaatttagaaagcttgatatatagtaccctgttataccccgttcgagactggggaaacttctgtagaaacctcaagagtaccaaatataactagtccgaataagaaataagcaccaacccttccgtctcaagcctagaacgactcaaagattcgcccgcgaggtcatcttcctctgcatagcctgttcaatcgccttggccgcagcaatacacttctcttcaccgaaccggccaccaacaacctgtatcccgacaggcataccctccaccaggttgatatcatctaaaaaggaattagcaccgtcctcaaaggctccaatcttatatactcacattgctgcttattaaacctatcactatcatttctcggaacatgggccagccactcatcatccggaacatccttcattctcgaagcagtagtgataggcattgccaacgcagcatagccaaggaaattccagatactcgtgtagcccacatatgcactggacttgacccacgtccacggtttgtatcccacccatgaggtattgggcatgatcaatacgtcgatatcggaggttatccatctatcgagatatgcagattcgaaattatatttgtccgcattgagctatgagatatgttagcagttaataatcacagtgccgataggagtttctcacttggtgcgtttgactggtagtcagagtatcctcgggcttaccaacaagcataccctcaacaagaggctcgccggttttctctatttgtctccgacagccctcgccaccgtcggagaaaatagccttcgcccagaggtcatatgcataactgtgcgaggaggcatcccactcgaaaactgggatttgtcagtacgtcgtacagaccacgcattgggagtggaggttgtcagttacgatacataccctcatggcccgccgcttccagcgcctcaacaacctcccgcatagccctcgcaatcggcggctgaaccttgacaacaccatcatcaaccaagaacccaatccttaacctcttcgcaccaggcgaagccaactccttccgccacgccacaggcgcaacatgctgatcaacctcccacggcctcgactccggcaaaacctccatataccgctcaatagtcaccagactacaagccataggcccagcaaccgatctcacaatatcctgcccgggactagaaatcatcaaaatcagcaccccctctaacaaacgcaaaacagagaaaaataaacttacttcccccgttcatacggatgtctaccgggactaggcgacaatccataaagtccacacagagcagccgggatacgaatcgaaccacccaagtccgtgccaataccgagcacacttccacgcgcagcaaccagcgagccctcgccgccggaactcccaccggaaatcagactgcggttgaaggggttgacgcattggccgaagacgtggttgtacgagtcggacatcatcattgactgcggcagattggttttcacgtagaggacggcgccgaggcggcggagtgtgcgcgctacggatttatctgctttggcggggttgttggtgaggccgacccagcctggattttgggtttttgttagtatataaggataggtggctttttgctatatggaagtggaaagggagattaggttaccgattgaagtgtcaactccttcaacggagaataggtctttgatggatactggtaatccgtgtagagggccgatagtcttgcccgtctgggcgagataatcatctagtttctgggcaacggcaaaggcctcctcgaagaatatctccgtgcagcatgttgtgagttggtgggcgagagcggcgcgcttggcgaagactcgagtcagctctagggacgagagttctccagaagagagcttgcggagaaggacggcgatatccgtctcttccgtgagagccagttcctctggactgagaatttggcgcagatatgccagagcgtctggggcggattctatagagggaacgggatctaagcgccattcggggatgatgagcgagagctggtcggcgcgcttttgagcgcaacggtcttggtacgaggtagaggtagccatgggaaataactatattgtatgtttatgattgaactatggaggtaggaaactggattctaagaggacctttatatgctcaccaacaaagtagataaggaatgtgataccttacccgattaggaaggcaatctaaccgagactaaaccccacaccgcatatcctccacctcctctcgcactgcgcctctgcgtccggataacgagggaattcacatgactggcagttacgccagtagcctcgtattatctcgcactgccgtgttatcgaggcactcatccctatcaggtatgcgggggtagctaggtgcacgtagaacctcgatgtagaagggatctccgcgatagcctggcaagctcgatccaccatggaagacactacatttgactgatatgtcgatgcagatgaatcgccgcccgtggccattcctgcgcgaccgaatgccatgattgcggcggcgcctctatacacggtcgcagcaagattgcggtccgtcaagtcgcccgagttgagctgtagagtttgggctattgctcgagcacagaggtccatagcgcaggttccattgccattgcggtgttttgcaagataaacaaataaatcgaacgtatctgctggacatccgactgagtcgaaaaatccaatagttaaggtctcgcgatgccaatcctcgaaaattaatggactttccctgacaagggcgcctgtaacatcaaaccacaccagataggctaggatatctgctagagcggagatctcgccgcagagattatcgagatcagccttatgttggcagtggagatctagcagcgagcgcgccccttggagatggcaatgccagttgccaaaagatccgcagcacacttcaaacatggcgaaagtggcgatgccgaaaagcgcaattgggtgtgcggactggacaacttggttcaggtttgtcaaggccactagatgcgactggagggattctttgttgtttgcatcttggatacgcgagcgggcgaagtttagcgtgcgtgaaatcagttggattccttcttctggaatgtcacgactgctggattgtatttgttggcagaaagtgtccaggaggtcgacgaagccgtatagattgatagatgctgacttgtaaacttcgacatttggcgattggtcattgggagtctgtggtgaggtgcttttgggcgatttcggcttcttcttatcatctacccatacaactcgctgtggatagttgcatgcttctccaccctggacacaggcttgacatcggggccggttcaagtcacatttgagccctcgggctttgcatcgaccacagtctcgatcgtgccgaatgcctcggggctttttcactttcatggtgtgtgtgaagttgccaggcttggaaggctatcaagatgcatagtgcgggggttgcggacacttccccgattagtcttgggtggagctctcgtatcttcgatgttgatccttttagtgttttggtttcggctgtttctatatcttcttcagtgccggaggaaaaacaagaagagagtgtgcattttatctagcaataaccctgcaataattgggttcaactctggttgaggtcaacaagtgaaggacacacgctgcgaagaaaagtgaaagacaatatcatcaaccgggagccggttggaaatgatcagagacaagataaaacgagggcaaagtcacagccggtcgagaatagtaaaattaaaacaaagcctgcagcaagaatagagaaaagagcgtgaaagaaaacgagagacaaatttgctagccatgtgctaactgagagcaaaaaaaagcaatctcgccagcaagaacagaatagcccaaatgaatagccagacccagaaaaaagcaacagaaaagaaggacatctatctataaaccagaaaccagtcaaataacttttgtgaataataacatcagtcaagacagtgatacagcctcatgtgttgttcagaccatctctttctgcataactcagtgcttgcacatacccgggctccaattgggaatccgcatcatgtttcgatatggctgcttgccacgatcggattgcttcctgcgttgcatcatgcgctcacgtcgatcgcgtctcttggtagccgaattcggttgctctggcttcaggttcagcgcttccattgaaatcgataacggtgattcttggaactttctttcttccgcgcgtcgacgacgcagtataacctttcgatgatgtcttgagataacacggatggaggagatcttggagaccttggagttcgccttggaaacctttgacacctttgagtctgagacttgagagagactctttgcttctgcaacactgatactggcatacaaactgcttccacgggagagctttcttcttcgcattctcttcatttgctcgatggcagcaactgtgagagatcgagtggacgcaacgcttccactttgcattgatgcaacgctttcgttttgtagggatgcaacgcgctggggcttggcaaacggtccatcatgtgcatgtggataaggggactcaggcctgcgagtgttcaccgagttggtcgtggacagaggagggctgccaacgccgactgttccaaagatgtgaggaggaagcgagttctcgatgctcatacgtcgttgcattccagcagggcctgatgcaatatccggataatgtgagttcatgtcaagcacacacattccaacaaaaggcgcctgaaggatcgcactgaaaggaggctgctccaagaagtggcttgggggggcatgatggagcaccgtaggcaaggaaacagcctcagtgtgctgggtacttggtgagccgggttgttcctgacagtctttggtcgggcagggcttattggcagccacaggagaatcatttcgtgagacgctctggtgcagtgagtccacaccgtgcgagcagtgatgacagacaacgtcatattccccttctcgtggtataaatgtcatggacgccgggtacattcccatatacatgtcaggggcccagttgcaaacctccaaccaagaaggtaactcgtcgagtgcgataagaggcgtccaaaagcctcccggacgcaggatgcaaaatcgtggacgtgggcgtagaagaaagcttggagggtgctgctgagattggacaaagtccggacgcggggtagtatactgcattttaaagagactggaagaagaaggaaatgagtgtagtggaacaatgattgtataataaaagagtgttgtatgaaagaatgtatggattatggaagaggaagaagaagaggagaaggaagaagaagaggaagaggaagaggaagaggggagcgatggagttctgtcgattctgaggaaggaacagcatagacagtattgcaggaaggagcgatgggtcaaatgtcaaaaggaaagaacgatagtgatgaccattcccagtaagtataaatctgatttctagcagatgttcctcttactgaggagcgattggctagagtattatattccatcttgtcacgtctgctggacaatatataccggacacgagagaggtcatcaaggtcaatgacgccatatgtatatacgatgatatagcgtcaaattttcatttccttccaagttctgccttggcatcaccatattgtcaccttttcgattctccttgtagtcaagttgagtcaaaaccccccgggctgattgatactagggctattttctccttatcttctcttatcgcgtgttatcggcacttcaaagcttatcggcccggatgcaaacaacgtccgagctactctggcagccaagtgttgtacacaactcatactcactcttaccaacttaccttcctctctcctcaactcccttccttccttctcaattacaatcttttatcaacaaaaccgactccatcatgacaaccctcacagacccaacgaacgccacccgcgcaactccaagcattcccatcgagaaagcagtcctccacatcggcagctcaaccttcataagcgcccccaaccaagaagtctgggcagcgctaacaaacacctcaacctggccaagctggaatagctttgtgccacgggtaaccattcgctcccagccaaccccagatccatctccatccacctccgcaccggacccagcaccagcgtcaacatcaacacaaaccccagcaccaacctcccaaaccgtaaatacaaacacagaactatctcctattctccaaaaaggaacaaaattcaccctacacgtccgcatggacccaacctcaacctccaccaagccccagccggcaacagacgtgcatgccctcatcagcgaatgcagagcgccaaacgcggagaccggcgaggtcggccgtatcgtttgggtcgctgattccgaagcgccgggctcgttttcgccatcgcttttgacggcggagcgtgtgcatgagattacggctgttgagggtgggacagaagtgaggaactgggaggcgcaggttgggtggttggtttatgcggtgcggtggctgtataaggttaagctgcaggcgaattttgagatgtgggttgctgatttgagggggtttgttgaggggggcagtattgctagttcttcttgattacgcgttgaaactgttgccctgcgagctaggctcgaaaaatctgggtatccccgtaacatgatcaatagttagccacctggacactttattacgcatgattcaacgaaaagtggcatgatacgagtgcttgaacatcccattgatcctgctccttgacaccggaatcggatgagaatggcctgagcgttgagccaaatggcatttgcgctggattcagatggtcagtagaccgcaaacgcggccgacgtgtcatgctatttaattaaatattatgttcattcctccaatatgcaagtatgcaaatatgcaaatatgcgaacaaaatgtactccaatgccatacatgttccgccaaactccatctaaacagggtatatggacaatgcaaataaaaaccaaaacaaataaccaaaagagcatagcaaatatatcccgtctaacatcaagcagacgcaagctcgacccaatcaggcgtcgtaatgcgcatcgccggatccttaacaacagccggcttaacaatgcgctcaacaaacccattcctcggaacccgactgccgttcatacccgacctcgcaaaatccacaatctgatgcccagccctcgccatctcgagcctgagccgatggttcatattaggataaagcagcaaatcgcccgtcgcagtcgcaagcagcgtagccgccagcgagaagacatccgacgcaggcgtcggcgccatctcagtagacgtgagggaagccagcatttccggcgccgtgaacggcggcgtgaacgagggcatggatgcgcgcgtggtatcgagcggcgcatcggccgtcggaatatcaacggtggcggagaaatctgcgaacagaggctcgtaagggaactcggggttctcgctgcactcgtctgtgtcgatgggtcggaggaggatgttgtgtggtttgatgtcgccgtgcacgacgccggcgacttggtgcagccagttcaggccggcgataagcttgcgcgcgagctcctggtacgaggctgggccttggacggggtcgaacattgttgctgttgcgggtctgcgggtgcgcgcgagctgggattgctcttcgatgtatagtgccagggaggaggggacggcggtcattactagtgcgctaagctcggcgctgtagccgtggaaggggacgatgtagtgctcgtggccttgggtgaaggtgaggcgggttagggttgatgcttcggctttgagaactgggcgcgcatcgcggcgcagtggtgctttcacggctagcacttgcgatcttgaggttggggagcttgggggtgtgccggggagattggtttgcgggcgtggcaatgagcgcgctttgtatactatgctccagacgccgcggccgaactcggcggggcggttgttctcgtcctggcagatttcgaggtcgtcggtgaattgtagagtgccggcattgtccttggaaatggacgtttgctttgccaaattttggaatggacttggagttgatcttggaggcctttctttggctataggcgtcaccggtggggtgagactcgatggggcttgagccgacagtggcgggctttggccggctgtctgaagcgacaattgaattggggaattggccatattttcagtgcgcaataccggaggaattcgcgagcagatcagggtctatatgatcccgggggaacgggcgagacccgcgtaatcgttctgatatcaacagcgccaccgggacatgcgataggcaaattaagcctcacccacgggtgcaagtataataatgacggagtggcgaatggtgtttataagattgggctagaagatagacaaagaataacagggaaatggctatgctaaaagtactccgaccaacagcaaagaaaaaaaaaaaacaacccaaaccggcccacttccggtctcgaacatgcaaagggaaaaagagagaaaagggaaagatacaagatcgacggtgacctcaagatactacggtgtcactggataagtgcaaacggggggaactaatctggagacgggtccagttcatttcctttgactttttaagattagacaagtcagtattcaacggttcgacttatttcggcaacctgcgatttgccgcttcgagttgcgatcggcttccgttggactcacccgaatctgaccagtcaagggcaaccgttgaacacatgttcgatcctgtggatcacgtaatcacggcagggtcccgaggtcaggtgattgaccagcgatcacgtgggaagaattagtcatcctgccctaagccgcccatggctaccaaggccacgggctggttgcaccggagacgagaaggttcaacccggttatggcgagggtcactgatcgcttgtagacaaacggctggtagaatgaggcaatcaagtccatcctcaagcgcgtcaagctcgtccttggttagtaatatatgatacccaatcccagatacccatgatgccaacaatgttgaggcaaagtcgaactcatggctcccatcaagggcttgtctgtttttggaatcctcttaaccagcgagcagatacagtagtgctccaagggcttgggtatgagtcacactcgggaagcggcctgtgacagcaaagcgccagcacgagattggcgtcaccataaattcccgaaatggcgttcaggcgcagtgacgaagaacttggaacacgaagttggcccccatgcgacattctcatttgtagcatggttgcaattccgacatcacaccgcgccaggtcattgccttgcgggaattttgccctgggcagccgtcgacaccagaaggtgggatatcgggcgctctgccgcttcatattataacttcgctctccattctgtaatctcccgtcaagccagtgcttattgtagcaactgacatcatatcatcatcgaggggtgagcctagggtttatctttcaccatatgactgtctgggcgatgacccgaatatgatgtgaagaggaagtccaggattctggttgttccgatcggattgtgggcgaagtctgtcatagcgtgcgtctacaccataataatactagaattcgaacaatatcatgggggtatcaactaaaagaacataatggaatttttaaccggaatcttcgtaggggtttacagtctccgcaaaagtccgattgctcagccagcctattttctactcggtagatagtagatactacttgaaatccaagaaaaagaaatatgcaaaaatggaaccagcctattgaagctttcgattcagctctctgaacccctgttcctagggcttcttatttctccaatcaaatcgatcttcaagctacggagtacttatccgtatcacccgggtgaaatctgggtgaaatctgggtgagacgggccggcgcgatcaccacacgtggctcagccagagtttagtgctatatcattgggtatgagtgcagggtctggaacgtttgatatgcaatgtgctccgtatacatatcagattttccctgactggggggggctgctgccgcacattctattggaatgacccctacagtagactttggtctcgactttgagggtggcttggaatgcgcgagatttgggcaaagtgtcgtttgaccaataatattcaatcggcaccctgcatctctatgttcaaaatggtaaatagtgtgtcaatcaatttatttcacatcgagacaaccaattgaaacatcaagtggttgttggtggctgttggtggctgttggtgcccgagccgaaagggctcctggggtcggggattacaggcgatcagtgttccccgcttacccactgtttcccgtttacctataaataaccttatacatagttagcacagaggcttggcatatgttagttaccgtatttagtgcttatgttgtatgcatgcggtcatccttggcctggccgaaataccgaattgagttgagcggtgagcaccaatgagataggtaggttctcatctacccttgaaaagattatagccaattctggaggctctttgaactcatagcctccattttcaatgctgttcttagtatgtagtgtagtcatagattcattaatgatcttttgcgcagtggagtacattaaacattattgcctagcaacccatcaatcaaataagacctaaacggtgcaagaaaggaaagaaaatagcaagcagaacggtcagaacataggtaacagagggaaaaagcaatatagaccggcaagaaatggccaggaataggaatatcaccccattctacccatgaacctgcctctccccacaagacatcaccccggaaacataatttcctctttgctcagcatattacctatcttcttcttccccaacccttcctcaaaggtcttcccatagtatgccaggcttggaccacatacccagccgctccctctggcgtccgctgcacaaagagcacccccatcgagatatagaatacaccgacaataccagtaagagctccctgataccccagcattcttttgccacgcgatagatacaaggaatcaccaagatctctttgctccccggatgaagaggcgtcaagcaacgcattcataccctgtagagtaccgaggacggtcactagagcgagggcaagcgagaaggcactgaaagtgattgcgatcactaacattgccttgtacgacttctttctggatgtgcctgtgcgagcaacgaggagcataattcccgagatgaaaaataggagggcatgaacgagaggaggttcacagaagaagacatcatcttggaggtgtttgaattgtgggagggtggtgttcagaaaggtttgaacgtcggattgggcactagagacttcgtggtctaggtgctcccaaagttcttcgctcaggtcgtccagatcctttcggcgcatgttcgagacgcagttggtgaacgtttgtgcggaggaattgccatcggaagaggatacggcagctgcatcggtgactgatagacatcctcctacatacagttagatgggacggatcttgattaatgaaggatgatttggcctcttgtccactcaccaaagtagcccacccgaagtgagatatcgtaggtcgtgtttgttgagagctcagcgaggtagattttattggaatctgccattgtccaggcgcagctcgtcagaacataaactggatgccgttagaaaatacactgtatcacgcattttgtctaaacttacgacccagactgattgccagtagataggaggcaaccgctagaaacacgagtgcacatatggatttttttcctcttcggttaccccctactataacgcatggaccgttagtattattctcaagatgttgcagtcgccaaaggaaaagtcaaatttcttacttggtttctcaataaccaccgtctgtggaagaggcgcataattcggtgcatactgagtgttcgtgggataaggattataaggagcggcaaggtgaactgcactggtagacgaagttggctttttcttgccagtggacttctttcctgtcttctttaccccagtcttcttcaccccagtcttggccttctttcgtggaagtgttgaggagctatagttctccatggtgtacggtaggtaatgtaatggaataacttcagagcctgcctttggatacgtctttcaggctcacatataccttttatataccccagttaaaccagggaattcggcctattggctggatagtaagacgtatgactggtgggaagtaggttctccccgaaagtctatccctcgtatacggacttggcagaaacgtgtatcaaatgggggccaagcgccatagccctaacaaaataatatcaagcagtagcctagcctcctagctcgtgtcttcgaaaaaggaaatatcgaaagccaagactctcaagcgggcaaaaagaggggtgggctgtgttcagcctcaacacatgcaatttagacctgtaagttgtaggcccgactgggcttcctacatgtctacttttggttgagttagccttggcaaacggaggctactagtatatttcggacgaagtagttcaatatacagttttggtctattgacgtgatttgctcctacgtatcggtacatcgtgtattatgaacatggggtaaatctagctaaacgcactcatcaggaatcgatagcacgtgaaagtcgactcgacatctcctcggaaggttcaggatcaccagacaacctgtgaacttgtggctgatgcatatgcagcaacgcccagctaatttaagacctacaggggtggtggtaagatttttcttcccacgtacgatactatcttaggaagtgcctttatggatactattttggagatatggcaagattaaatcacactaaacatagcccgagaaacgggacaacagttggtcgctttatactccttagaacggtggaggcttagcccgctggtgtgacagccactagctcagcctcggatcattcacctgggcatacggctcaagagaaactagtccacacctccgtaccgctctcccgggacttttccatctgtaggtcataaggccgcgaaatccattgtcctacatatttctccatgcccttggataagagacttggatacgcaacccttccctcccaaacgttttgttgaattttacgtcaaacatggctacatatatggcacccattcctcctagcggacaaggcctaacggcaaggcttgtgcgccaaacaaagattccaaagcccgacaagcacgacgagagcaaggccattgacattgtagccgtccacggcctggccccttgggagtcttatcctgacacttccttctggctgcgcgatttcattgcaaaggacattcgtggggccagagtatttacatttgactacgatgccaaggcagtctggttatgcgaattgcctctgaagaatatccaggatgtgtccagggccttgcttggccaaattgctgctattcgggaggatgtccccgagacacggcctctagcattgatctgccatggcttcggtggctttattgttgaatcggtgggtctttgtttcagcattcctttactggggtattatatagctaacaaattcctggaataaagtgcctgaatgatgccttttcacaattcccaaatacaatcgattgcactcggggaatcatcttccttagtaccccacaacgtgcatcaccagggatcacgtgggcgacgctcttgctgcgttgcgcgagagacagtatacgtacacctccagggctgacacaggctgaactggcatattcgcaagaccttgtgtgggcaaagagaagtggagttgttttatgcgatatctccgagggcttcaaggcaaaggttaccaagaggatgaaattgtttttctgctacgaagatgttccgacatggccacagcaagaatgtgtaagttctaactcacaagctcttgggtaaaaagggtggtatgctgatattgcctatagagtttgaacgagtattgcgcagctcttggtcgtcgtggcgagaaggtcgagttgatggcgggttgtagtcacctctccatggcaaatttccaaagcagggaggatgagaactacaagacaattatctctgccatcaagaagatccgaaagttggcattgaaagacacagcacccacttcatctggactacacgaaacggctcaagaaattcagaacctccaggtcatccagtcatcccaggccacgagtatacataccgtccagaacacttcggtcttgaaccaacagaatttcagcttgcagaatgcagtcacggctacccacaatacatttggtgctcgtgaattaagccatggttcatcgcaaggtaccatgatagcgctcaagaagtcaggaccggcctatggcaacatgcaggatgcgtcaagaatatattccgccactccacaatcctcgcaatttgacgcgaatatgatgaagattcgcaggcgtcctgttggactgtcccctgtcaatcaaatatcaaattcacctggtcacgaatctcagcctaacataccatcacaaaatcttcaatttacatcgggacaattgggacagcaaacacagcactacgccaacattgcaccaatcactgcgctagaaccgaaatcctccaccaaatcaggcaagaagcccaaaatgccacaagaagccggccctccacgtcccgcaaaactaccattgaaccccggagatgcggcacccagaccagcagtcgtccgccaacttatcggtaacgaggggatgctctccacttcaagcaacattcacagaacagaccagcaaatgcattatacaaccataaatagcatggcaatgagttcatcccaacacatctctccgcagcctagttcagggacatacaactaccctccagtcccgcatccattccccaccaatcatcctatgactcttacagctggagcaatgcctgttcaactgacatccccacagaaagtgacaaagccgccgaaggcatcctcaggcgagcaacgccccgaacctgcaaagctaccagggacaaacccgatgccacaccagatgcgccccaataaggttgattcgggagttagaggacctccgatcccgactaccacagctggaaccatacccaaagtcgctccaatgcaggcaccccccaccgtacagcaaggcctgcgggaactgcagctacagcctagctatactccaccccccaagaagcccgggttttttaaaaggattttttcgtctagcaaggaatcggcacctgtccctaccacaggaggtcctggagtgcgcccgggaatacaagtcggtccacaccagccgtccgggcagaccagctggggaggctctgggttacactcggggcctcaagtttcacaccagccattgaacccgtccaagtcatccaaacctccatctggacctaccagtttgggtggccctggagtatactcggggccacaagtcggttcacaccagccactgaagccatccaagccttcatccaagtctccacccgggcctaccagtttgggggaccctggagtacactcgggaccacaggtcggtcttcagcaaccgttgaagccgttgaagccgttgaagccgtcgaagccggccaagccttcgtccaagtctccatctgggacgaccagctctagtggccctggagtacactcaggatcactaggcggtccacatcagccgttaaagccgttaaagccgtccaagccatctaagccatctaaaccatctaagccttcatccaaacctccgtccgggcctcccaaactggtcggcccgggagtgtactcggtatcacaaggcggtctacaccagccattgaagccgttaaagcagttgaaaccgctgaagccatctaagccatcttccaaacctccgtccggaccgaccagtttgggaggcccgggagtatactctggatcacaaggcggtccacaccagccattcaagccgtctaagccgtctaagccgtccattttgggaggttctgaagtaaactcaggatcacgaggtctttcgcaacagccgtacaagccatataagccgtccatgccgaccagcttaaggggacctggagtacactcgggatcacgagatggtccatatcagccgtacaatcctctatcacatacgcacttgtcaccctatggcccgccgagaccggggcaaggcccattgatacatggtcacaataataatgaccacttcgggccagggcaacatcagacttggggtcacggtgatggttttaattttgcaccaggtcaaacttctagtcacattactagtaatattccagtcgaacctccagctaagcccacgggttcggttgaacctacaggtccaatcaaacctccaggcccagtcgagcctccagttgagcccacaggcccagttgagcccaccggcccagttgagcccaccggcccagttgagcccaccggtccagttgagcccaccggtccagttgagcccacaagtccagttgagcctacagatccaatcaaacctccaggcccagtcgagcatccagtcgagcatccagtcgagcatccaatcgagcctccagttaagcccactggtccaatcaagcctccgggtccagtcgagcctccagtcgagcatacgggcccagtcgagcctataagtccaatcaagccaataggtccagtccaacatacaggtccggctgagcctataggacgcggtttcactcctgatgagagtcatggccaggcctggaagcccgatcacagtcgcaatcaggctcaccagtcccagtccctgaatcaaagcagtcgaagtggaaatatagccgctggccttgcaggtttagctataggtgcgggtggtgcagcttttatggtggcttccatgggccaaggcaaagaaaatgacgaaagcaatgttaacgatgacaacaaccacgaaggcgatgatgacagtgatagtcagggagaagggggaggtgatagtgatagtgacagtgacagtgacggtgacagtgatgaagatgatagtgatggtcaggaagcagtgggaggttatggtgacagtgaggaagagggtagtgatgggcaggaagaagagggaggtggtgacagcgatgaagaggatagtgaagagggaggtggtgacagtgatgaagaggatagtgatgagggaggtgattaaggaggtggtgacagcgatgaagatggaggtggtgacagtgatgaagaggatagtgatgggcaggaagaagaaggaggtggtgacagcgatgaagatggaggtggtgacagtgatgaagaggatagtgatgggcaggaagaagaaggaggtggtgacagcgatgaagatggaggtggtgacagtgatgaagaggatagtgatgggcaggaagaagaaggaggtggtgacagcgatgaagatggaggtggtgacagtgatgaagaggatagtgatgggcaggaagaagaaggaggtggtgacagcgatgaagatggaggtggtgacagtgatgaagaggatagtgatgggcaggaagaagaaggaggtggtgacagcgatgaagatggaggtggtgacagtgatgaagaggatagtgatgggcaggaagaagaaggaggtggtgacagcgatgaagatggaggtggtgacagtgatgaagaggatagtgatgggcaggaagaagaaggaggtggtgacagcgatgaagatggaggtggtgacagcgatgaagatggagatggtgacagtgaggaagagggtagtgatgggcaggaagaagagggaggtggtgacagcgatgaagaggatagtgaagagggaggtggtgacagtgatggagaggatagtgaagagggaggtgattacagtgatgaagaggcagatggtggatggtggtagtgatggagatggaacgtagccctagttttatatgtccttgcatctatctgtatgtcgatgttcatatctgtactccgtattgacaatcttcacttaatgcgctcatacaaccctaaaacccccagacaattatgtattcccatccttgtttacattctataaaattctataaatccttttgtccaaaataatatacagttatatacatagtgccaatcaggccctatttgatcttcaagccagtagggttattagccccattgcatagctgcgcctgggtcaatgtcccacccagagctcggctgaaggagaaagcagggagcttatccggaagcttctcatacttgatcgcgatatccaacagggtttctgcggaaagaatgcggagtcgaacaccgctcaaatcatagtccacgttctcctggtagctgaaagctgggtctgaagttgaaccatccggcaagggcatcggcccatagccaggcttgagtcttctttcggcaaagttcgcaaggcttggaatatcccgcacatgactattgatagtctcattcgggaaaagtgttgtaaggagttcggcaaccggcatcttgttggacacaaatgctaacagtccataataccggtcgaggactggttgtaccattgcgctcggtaggtcaaaggccttcttcagaacgggcgggttagggtccgcttcgaaatatatgactccgcgcccgctcccacgaggataaatctcctctgggtcgatgtataggggttcaaatggtcgtcggtcatgtaccaggccgccatttttgggggcttcaaccgagcggaagcgaagatcatcgattgtgaaattatgtttttcccatattgtccagtgagaagttgagatcaaagtagtataacttgatttgagagatattatctgatcttccagagccttcagactctcaacactctccttaggatccgcagccgcacgtgcaaatgaccggcccatttcgtcaagcttaatgattatgttgacaagcttttcgcgaaactgatgggctgaattttccctagtgaggtgcgtgaatgctattcctcgccgtcgaatgatggctttgatattggggtctgtggtctcgtggctcgaagagagaccgaactcgtctgctgccgcgatgtccgccaagagcctctggtgaacatcactaagcactcgcggctggtttggtatttcttttttgccgcggtgaacaacttctggcaccagctttaacggaggaagctctctgtcaggtggagtgataatattattcgccgcagctctttcagccacgagcttcctgttgtcatttaagtaatcccagccttgccatcgaagggagttttcagtttcagctggagtggcaatctctatgttgtgcaagcctatggtctccgcaaatacaccagttcgtgtgcgctctgtagtggaccgaggtagcatattcgagactccattgaagggcaatgaggcaatgactcgtacggccccgtacaaattcaacccattctgttctaagcagcttttcatgaagctgagaaaccagcggttgggtttgaaatgatccgtcggagagacagcatcaggcagattagccatgatgagaagtgtatcgttccttggtataatcgcagagccttctcggtttccaggcccttgttctggaagatgagttgcaaagaattcagaccaatcggctttcccatatatgcgatcatcgacgagcttataacacggcttgctcttagcgaggcgtgtgagaaggccgtgaaaggcatgatttggttcaacaagaatatggcgacgtggtttaatgagttcattcagtctagatgagcagaaaccacccccaggccaaaggtccagaatgtctaccggcgggtttcgacgaaggtagggagatacgcgctcgaaaacatggtctgcaaagttcaaggcgtataagcatatttgtacccattgtgtataagagctgagattcaagacttgcctagtagccctggactcacgtattgcggttgatccttggttttcccacgttgaaggcggatcgccgagtaaagcgcctccgtgaccggaaaccgcgccagcggcattcgctctttcctgattcgcctcattataaagatctggcaaatgccaagatgattcttgcgtatggcattaatggaaggagagtactaattgaagggagaaatgtgagggaatccctcgaaatttctttgacgttgaagagcggagagcggagagaccaagcttcccgctctctcatcccacctcttctcccctcaccaggtttatcttccaggtcgcctagatgcggctcccacaattgccgctggtctttccaggtttcggagattcctatcatctcactatgctctttgaggcttgatcctggctcaaattcatcattttggctttctaattctcgtctacccttgccttagcgcaccttttttgttatggcttccaatgcgataggaggtactgcccctcaaagtgttgagcatattacgcggatagcacagaactacgagtacaactcttcagttcctctgcggtactggctgaggaccgccgcgacgcttttacgtgaggttggttatacctgttgcctgcacgtggatatcgattactgcagacttgttgacttttcttcatttgttaggctcacatttatgaacgcgaaggacacgatgagcaagcctatctcattctatttcgacacgctcagttgatcctggtccatctttccaagcaccccgatgtcaaaaagaatgaggaagatcgcaaggcattggtggcagccgagaaagaggttgagaaaaaccttagcaagttggagattctgcggccgcgtatcaataagcgctatgagcgttacactcagttgatgcgggagcgcgaatctcgccaacagccctcactagccaaaaccatccccgaaccacgcgaacaagttccggatcctgctctcgccggcgtggcagagcctttggaagctggagagaatcgagatctcgccgtgcagttagcccaatcagagctcaatcgccgagccaccatccgaaactcaaagggtctttctgggccatctgccgaggagattgaaacacgtcgcgcagctggcatatggagggagtgggaccattctatgaaatcggactctcgcacgggtgatcgcgaccacacaaatcaaccttatagtcaaacccccgaagagtccgagattccttcatcggctgcttctgcgtacaagtatccaactgtgccccgtcaaaagcccctggaacccactgtgtctccaggccaaattgccatactcgataagaatgccgaacgctttgcgcctccgatattgcctcccaaggaacaccttgagcctagccgggcatcttttatcgatgattctacaacggctgtggtgccatcgcgaccggcaaaggtattgccaggcccggtgctgcctgagaagatccaaccttctaaacaaaccaccgccacgcgttcagatctcgatccctcaagttacaccttcaaaccctccgcctatctcgaaaatggcacccccttgcgctcggtattcttaccagcgaacctccgatcccgctttttatctatggctgcttttaacacccgcgccaaccttgagacatgcggtatcctgtgtggtactcttgtttccaacgcgctcttcatatctaaactggtaattcccgagcagacatcgacgtcagacacctgcgagacggttaatgaatccgccctcttcgactactgtgactccgaggatttgatgacgctcggctggatccacacacatccgtcacagacctgtttcatgagctcccgtgatctacacacacactgcggttaccaagtgatgctccccgagagcattgccatcgtgtgcgctccgagcaaaaaccccgattggggcgtattccggctgactgatcccccgggtctaaaaacggtcctgaactgcaaccaaaccggtctgttccatccacatgccgaggagaatatctacaccggggcattgcgaccaggacatgtcttcgaagtcagtggattagaatttgagacggttgatcttcgtccggatgccttaaagaattaatagcgttgcgcttgaattgttcaatacactgagataccatcatcgtcgcattgatctggcttttttcgtgtgacatttcatatcttctagaagggtcatgccatttcaatagcgttaaaacttgctatcatgagtttccaattgaaatatttcctttctgatccatattgaagacatcagcatagagttggtaggttctgctcagatatatagccaagttcaaccttatttgacgacatttatgttttcagtgacaattagtgtatcaaaatactatttagtaagacaattgcaacttatatgtgtatttgatctcattccataggctagagcccaatacttcattgttttctcgtaatcatgccacgccttacaaggatggccaggtgtgacatcttagatttccccacatgataagtcgataaccatctcaacttcccctccgcattcgtacctctaccatcagcttaacatccttcgtcaattgattttgaattgcacgaatgtcgtccccatcacaagaaaatatcccctccgacacccccacctcctccacctccactccaggatcaccgtcccaggcacccacagaaaaaccaccctaccaatccgctgcctcctacttgtcctacccagtcagccacgtcgtctcagggatctatcgccgcatagcagacccagagccaactaaagaaatgccctccgtcatgccatggtcgcggtcctcctcatctgaagcgttcacaccgcaccgaacggcctcacccttccaacccccaccactcacacccctcaccctcgggatccccacaggggccgactcgctccagcagcaactcctgacacgcccactagcagaagaaatccgactgctagtgccgccccgtctgcagctcgccgaaacctggcgtctagcctacagcctgaaccgcgacggcgcctccctttccaccctctacgagaactgcgccgagttctcgcaccgcagcccgcgggcgggctacgtcctcgtaatccgcgactcctccccctacagctccgtcttcggcgcctacatgacggacgccccacacccagactcgcagttcttcggcacaggcgagtgcttcctctggcgggccagcgtgctcccgcccccggcaagcttccccctcgcctcaccaggcgaaggaccccagtctgaggaagccctcgagcgcgctggcctcccccctcccccctcggccgataccactaccgccggccgctggagcaccctgcgcaacgacaagtcgaaacctgcgcgggcggaatcgccggctcataatctcaatatgaatattaaaactaatctcgccgctgcgagtggcggagtcctggcgcctccttcgccttcctcgatccatagcccttcaccgagtggtgcgagtacccccgaacgcattcgcttcaaggctttcccgtacagcggggttaatgattacatgattttctgcgagactggatttctcagtctaggaggcgggtaagtggttgacgttgctagaatatttatttttcttggctaatatgacgtagtgacggccactacggactgtggcttgacagcagtctcgaaaaaggtgtcagctcaccctgtcagacttttggtaacgagcctctctccgatgaaggcatcaagttcgatgtacttggagtggaggtgtggtatgtcggttcttgaacagccgcatatgtacagcctgacgccttacacttgatgtataaagaatgcctgtgtcggagaggacatacgtatggaagggatatctattttgatatagacagggccgacaggagcggactgtggcatccatcgagattgaagacccggatcaggaaaagtagttcatcttaatggcccttcaaatacccagacggcgatgtggtgctggcctccctgcattgttgattctgctattgacatttgccttaatctagtgttgcttgttttgcctaataacttttgtcttgaactttggataattcacacaaacagctttgcttttttgttatcatcaagctagatgtattttctggatggtttcactcttatatggcaattctttcacaataccgtcacttgctactcagtgttaattcagttacgcgtcaaaaagcactactcagatcgaaagtgaggaattgaaaagtaacggtttctattgctgattcaggaattctgtttgaaatccctgaaccaggtcaggaaggctgcttcgaacatggtccacaagaagactgctgagacgacgccgcaggttgccagcccccacaaattgccgtgtcagtgtcttccaatctcctcggtcgaagaactccttctccttctcctccctctcctcatctagcaagtggcgtgtctcggaagacttggtacacaccaagtgcaaccccagtggcacttcggatgccgatctttgatggcattcaaccataacgcttccttctctggctcctcgagtgtgtcaagatgggtgatgattcccaagatccttcctcggttaggatcatacttgtcagcgaagtcgattaacttttgagggcagatgtcgattttggcggagaccacggggaggatgatgcaccgttgattcagcacgtagttttcaatcgtccgacgaccaggcgtcttctctcgacctccattgtcgatgccatctgcgaagaagagcctgggcatgtcgatgagagtcaggtcaggtttatcgggaccagagacctcaactctcatgacatcgtcactgaatccatcctcgagggagaatttgacgagttgcgttgcttgctcaatcagcgcgactgactgctcagtgttgttgtgaacagggggatcaaatgattctaggtgccagaggtcgccttcgcttattctcgttgggccaggccgatgctcactttgaagcgaggtgttgggtcatagcgtagtatgatctcagtaacgaagccagtgtaaaagtcattccttgatggaaagctcacgccggaaattgattcaataacagagcgtttggcgttggacttggaaccacagatgatcatctgcggcaaatggacatatttactaacactgacggtacggagttcgtcgacgatgtcaaggatactgccttcttctgtgtatgactgaggtggagcttcatctggcttggccggcatggacatggtaaggtttggatgtaataggtatgttggaatgaagatggaacgagccgtatgtatttgatggcaagaaggatgatgaagtcatgaagataaaagatggaaagaagaaaggaagggaagaagagtccatcttatatattggccttatacgtttaacgttaacagcgtgcgattcggcgactcatgcgagtcatagatgatgattatcgcgatgatgcgatgcgatggacggtcatgcgccttgaaatgccctactcccgcgttttctttcacacttctggttaaagctattagtcgtttgttccttgctctactcaaaggtatgtagagacaacaatgctcacgtttctttatccccgaatggtaattagggcattccggactttatgtgagagcaaaatatattggacgatatgctaactttagggactttaagaataattgctgcttagtatctaagacctctgttcgctttgcatttctttgtgaactagagctataaggacttcggatacttctcaacagcctcaggtgctcgccgccttatccagcaaaccacgatcaaagtaacagttcagctgccagatttgtaggccatccgtgccgcatccctcctcggatttgccaatctcataaacaaaggcttggggcagaggtactattccccttccacctttgagatgcaagttgttcgtggtctccataatcacggtatgtttgccagacgtctcatcgctcaaaacgacgattgaaatcacgtcatgtgcacaacgctcaaactgtccgtagagatcgatgtagtaatcccagatctctttggccccatggatgatagaccgatcagtgttcaccagggtcgcactggaggcgtaatatttggttgggggcgtggtcgtcttagcaatgctgaagtccactgcatatttcatgtaccatgagaggactggattggtcgaaaatactgagggtgggttggcgagattcaaaggccctttgaccacggtagtagtgacactcatggttaagaatatacccaattgaaatataggctgtgatcaatggagaaaaatcgtaagagagagagcagttcaaattattagtatctaaaaggaatatcatgatatcaaagctgttataaccctcggctcgtcgtcgggatgataccgaggaacatccgacctcgggacccgtgaatctcgggaatcccgactcaggatgacgtaacccgtattgattcaaacacaccagcatgaaggcagaattgaattgtaaggcagaattgaattgtaaggcagaattgaattgtaatcaggggaccaagttaaattacatttatatcagctatgtaccatggatatcttggtagctttcaaggagctttgacctcgacaagcagttttcctgcgagatgtttagtataaattcattagtgtgcagaaatcaaagcttacctgtgtttacccccttatacagttgcatcaaggcagtttcggcttgggataacccgccatgcacaatggtttccctccgttgcaatcgaccctccgcaagccactggctgagcttccgtctgatctcaggtttcttatccatatgatcgaagacaatgaagccttccatgcgaatccgcatcctccatatcatcatgtagttctttggtcctttgacctcctgttcattgtactgactgactccaccgcacatgacaaatcgagcgtttttgttggcacagagtagagccaagtcgaggacttctcctccgacattgtcataaaagaggtcgatctttccttgcatcaaactcttgaacttttcggcgaaatcttcgctcttgtagttcagtgccccgtcaaacttgaggtcctcaactaaccaacgacacttttcatccgagcctgcgattccgtacacagtggcaccgtggatctttgcaatttgtccagcgatagacccagtcgcccctgctgctccagagacaaccacaaagtccccaggcttgacatggccaacctcaaccatgccccagtacgcagtgattcctgtcaagccaaggacgctgagaaaatcggtcaagtggcctccatccgcaggatcaggcgtaggcacggattccaaagagctctcattgataattgcctgctcagtccaacttaccataccgagagcataggagccaactggaaacttctctgaccgcgaggcagttacacggcccacagcgtagccacgcatgatttcgccaattgcaactggaggaatgtatgaaggtcgatcgtccaaccacccacgcatcgcaggatccagacttaggtaaaggctttccaagacaacctctccatcttcaagttcttccgaagtaggagttgtatgcttttgtacagcaaatgtttccccggggacaatgtttgtctccgggcgctgttgaagatggattgcgatatgttcggaggacatctgtagataaacttgttatgagtatgatgaaaatcaaagcaaggcctgtaaaaccgtactgttcaagcagtcgcttatgcgacaaaaatatatttcaaagaattagaaagcgatagcctaacaccgttgtacagagagagtacgaagtagacaagaataaactgtttctgtggccccttcgacaggacataccgctttatcatcgactacgcgctacctcgggaacatcccgagatcctcggattatgcagccgctttacccgtacggagtaactatacggttggggtgtccctttaacaatcccctatatatataagcttatataagtcatataatgaataactatctacgtcaggatacatctgtttcgatacggcatatgatcatccggcaaatagacttccttatagttcgggaccccccaaggatccccggcgatctagcatcaggcccctaggtagtaaccaagaaattgctacctatcagcgggtacatggttctattctgataactaagacaattgtagtattaaattagccagctgaatgctatgggtccgacaaaagatgaaccatgccatcaaatctcctccttttcatcttcttctgcttctgatccattaccgtcgcctgtgacgtgccgggtcttgcaagatagaagagtgcattaaattcagaataactaagatagggagagaaaggaaggaagcaagttgcaaggtaggaatcagccagttcttatagttgagtcctgaccgctttgtaaaagatgcaaacaaccaactctcgcttagcaatagcaaacaagcaaaaaaacaaacaagcaagcaaacgttggatcgtaacatcgccgaggggacatcaccttccccttaatcagtcacaccttggacaagtagccaatcatcatcagcgagctccgtgtctgggtgatcatgtgttggaagatccaagattaccccagtgtattccttcgtggttgccactgggatgggccatgaccatttcgcaagcatattgagcatgtcataaagcttgcccttgtcgatagtatcaatgtacggcgtgtcctcgggcggtattacggcgtattccttgaaatccaaaatgcgggtgaactgaacatggacttgcccatcaaaatatccagctaggacccgagagtgccaggaatagacgagggtgaaacgtcgccggtctcgatatctagatgatgaaactggatccgaaggtctaatagtttctcatcggagatgactggattgtagtcaggtgagtagaaatacaacgatttcgggtccgaaggaacaggacgtagggctcggagaataacccaaatctcattgccggcaagcgcaggacgcccctggccggtgtctagcttaggacgtccctgatcggtgtccaaattgaaaaaatgatccaggtcatatgaaccagtttccatgttgatgataagcgttagtttgtatgagagtgtagtagaaagacacaaagaatgggtgacgaggctgtgcgggtaaatagaagaacaccaatcggcgtgaaaacgctgctaaaaaaaaggtgagtccttgaaaacgaaatcccatctagattctacgtcagaatgggatactagtcctaattcgaacattcatgctgctgaattcggtaaagtaggttatggtcctcactgatcatcacgtgatggctctgagcaactcagtgagtctcccggactgatatttactcgagcctgactctaagcgccctcataaaagcggcagctatgataggaaagccccaactgacagagatgatctttacttttcgcgagctctgattcggggttttgatatactagtgagcgcatactatttgcagttgacaggaattcggttgggattcggatgcagaggttctttgtgaggtcattctgatgcagagctgtctgcagtgcccctggattgtataagcttcagctactaaaccagatttggtacctgtctatagacatacacttctctttgatcatttcatttcggggtgtctcatcacctactttcatatagtaaacatatatttctctctgatctccatatcgccaaaatggagcaacacgacttactattcattgtcgatgcgtcaagccatgaaaactgctatctacaatcgctgaacatctctctccctcaaataatttcgatttccgatcaaaagattctacataactagggaacgcaagtgccatacggccgtcaagacagctctgtcgaaaccaagggtctcctgctccaaccgtccagtgtaaaaagtgctcaaatcatatgatctggcccgaagaatacaggccttccgcgttcaaagagtcagacttcatctgcccctcttgcacgtcaggccttgtcccaacagccaagatcgaagtcacaccatatgcactatcagccgagaacccatactcctggctagtccaagatgcaaatgaccagcaagcatggcccttccgggacgactccatcttccaaaccatcagtagaatgggtagtgaaggattcctttccagaatcagtcttttcccttcatctaagtcccagctacgctacaatggaaaactgatccacaattctaaggcgctaatttcaatcctccaggaccgagtcgcaatcagcaaagcaagcaacgcaaaatgttcgatgtgtttccatagatatatgtgcttatacccagcctgtggacgggatggctgccgccaaaaaaatgtgtagcgtctgcctggtagtgtggtacaagttcaactctgcaggctgtgtgatcaaccctgcggtgctgggatgtccgttctgtcgtcgataccccactcttcgcctagtagtgaaatatggattgggtattcatgcagttaaatatttttcccaagcagtcggtgggaagggaaagttcatttacgcatggtgcaggaaatgtaatactgccaaggtggtgatggagcggagttgtatgcttagcaaatttcttgaattaacggactgggtttgtgatgagtgtcgcgaagctataaagagaaggcagcgccagacggtagataatgactgacgaggttatcaatggacaagaaccctccaggataagtaatcaatgggatatttcacttgtgaattgtctgaactagctagctaccttgcaggaaaagatctcgtttaatgagtaccacccttgagctccaaactaatatcacgtaagaaaaggactctcaaacaatgggagacaaagtactgaatgtgaagaagaccccatgtacaggagatctccagcggcgttagaagagcagaaaaccccccgcaaagaaatcacggtattggaaagacgggaaagcacaaaacatcagggggtatgggtaatggtacaaaaataggaaaatgaggggccgatgagagactggggaaaagcatttgcagactaataaggcgagttgacaacttcatccctaccaagacgactgctccatccactgcgcgcacggtttggtgtggcaggaccagcgatgctctcgcgcgtaggcttcatgaaggtacgcttggcgaccatgttgacttcgtttggcagagcaacgatgacattcttgtcagagccgaaccggaagttatcagccatgacattctcaccataccgcttgatggtgtacgggtccttgcggttggcaataaccttcttcatactccatgtaatgatgaagggaccggtagcggtgacgatgctagtttccgttgagtcgacaccagtgttgaaacgtgccgtggtgaacgaaagaggctgtttcgtctcgtgctggaactgggcaacgtgtgcgggctgcaagccaagacggcggggttgaggctttgaatccttcgcgaaagcacgctcgaatccgagcttgccctcatttttgccttccttttgaagcgaatcaatgaggagaagataggtacggcaagttgccagcacccagcgtccatctgcggacacatcaagaccgataattggctcgccgagagccgggatatgagtcttagcattgatgcccagacgatcgaacatgcggatgtcacccttgttagaagcgacagcaaggtatcctttctcagtagtagccatagctgagaagtcattcttgctggcgtattgcttgagatcagaatcgacaagcttgttgccagagagacgagggtcgatgcggaagagggcgttcttggagacaccaacgaatggctgcgccgcggtcatttgcgcgaatttctgcgtgtttcgttagtttatccagagatagatttcagatggcgagacaacttacattctcgggagcgaatgtctccacggcgatatcgtcatggaccttccattcgtcgatgattttgccgtactccagatccatcttgaacagcgagttgggatcatctccattctgaagaatcatattctgatcctcagcatggagcatgaccttcttggggctgaagagtttgccattaggggtctcgaccttagaaatagtcgtggagaactcaaggttgttgtgagcggtgtgcttgaagacaccgatcttggacccacggacaacgaatgatcgatcatgcttatagccaactgccagttgtgagttgatgtttccgtctgcgtcacgcgtgacaatatcttcttcctcttcatcgctgtcatagtgttcactgcgctgagcatcgtcctggtcgccatcgtattcctcttcggcctcttcttcttcttcctcgacctcttcctctggcttgtcttcggaatcttccatggtaaggtcctggaaggcatcaagaacataatctctgtcattctccttgactttagtccacttcaactcgttcagctgttcccatagcgcctgcatcagaccctcctggaaccgttcttccgaggcttggtccttgaatcgcaggagccatgagtacgccgagccatcttcactgtagtggttgaagatgaatgaaagatactcgaagttaaagacagggttgatatcggcgacgacagcttgtcctaaccactctttatccttgccagaaatctggagccagtactgccaagtaccaacctctgagacagtcgcaacaatttccgactcctggagcacaaaggttccagtggaaaagtcgaacaaatgcagctcggccttttccttgcagagaatctccttggcttcggggtgggctgcagacggcggggcagtagtcggttcctcctcaagagtggcagtcttgatctggcccttggactgagcgtattccacgtcttttgtcatcgctgcaactgaatcctctgccgtgaaggaatttctggtcggcgaagagaccgggctcgcagttggaatgggcttctcttcgtcgtatgagaactcctgtaactctgcctcggtagccctctgtgcgctgcgacggtgcttgcgttcgtattgacactggagggcggcaagctcgaaagtggcaactttatccgctgggaccgaagagtcgcagatgaattcaaagagatcaccagcgtcgccgctcaggtcatcccaggccaatatctttgcgcctccgtcgcggagttcagagcgaaagtggagggtctggtccaggaggaaaaccttctcgtccttatcgaggccgtcgccggcgccttcctcgccgtcgtcgtccgcaagttcttcctcgccctcttcgtaggctctctggatgacaagctggtattggaagtcctgtccggtacgtcggatcgtggcagcggcgtccttgaagataagctcagagtagcctttaggcgactgtgggcggacgagatacagctcgccttgggggatttcgatgatggtttctttcgaagcgtcaccaaacaaaaatttgctcactattgaattagaagaaaaggcggagatcagtttactagtcaaaatactaaataacagaaaaatggccttatatggaggagtttggcggggcatgaaaagcgcgttgcttaccgttgcggagcataaacatggttgcgaggggcagctgccaaacaaaaattcgtgaggcagttgagaggaggaaaagaggtaagaagaactgaaggaaaaatgagataggaaagagcggaagaaccaggcaccgtagcaaagcctcttctgcctatgagaaaaggataggaagaagcaaaagcaagtcttctcaagtgcaataatcacaatgaaaatcgcttccgtcatagattgcagggtcgtggctgttgtggctaattgctgaggtaagcataccgcctgcctgggcaacctagtccggaataggcaatatgctttctacattcatggctcatggatgttctatcattgttcactgtcttttgttaccttctagtcagaatttacagagctgggaaaggttagtgaagcattaaaaaggaacattaaaaaggcatagcagaactcaagtagatcacaccttgtacacgacaaccgataccagactattgatccaagcttatgttcatccatggatatctcaaccgctgactgcctccctttgggcattaaaatatgtacaacatgttcgttggatagttcacactattctttctcttcgttttcgtcctcgcttccttcctcaaaagctgcaatctcctctagctgtttcatctgttctgcttcggcatcttcttcgttcacatcttcatcaccattctcgacatcttcctcgccccgcttctgatctgccctcaaagcgccacctttccggggagggataaccttcatgaacgccttgccccagtcacgaagttccaaccactgaagcataatctcaatgacatggttggtggccagtaccggacgatgggccatttgaatgtactgcccgataggcaatttggcagttttgatgccctttgcaaccgcttccttgtaacaaattgccttgtgtcggtttttatccactagcgctccaacaatataagtgctgtaaggcttcagctcagtcagagtattctcactatcactgctgagatatatgatttcaccgtcctcaggcttcgcatcagtttgttcagcgaacggtccggcgagttgtcctcctcgcggggctgtcatctgttgtttggccagctcgccagcacgtacaaagtcatcctgtagaaagcgaacccgtttccagttcttgtggcatgccagtacggtgtcaaatcgctccttcagtaatttgttgaatgacgagaatatcatgtgcccattgtagagtgcgcggctgttgtctgagtatgagcgcgtgagctgaccagctaatgagatgcgctctctatcagacatcagatcgtcgtagccgcaatccatgacgaatgtaagaggtaagagtgttgacttggtgtgcttggcttttttgccccgccataagaccaggagcttgttcgcagcttcctcgccgcctttttctcgtgcctctgcaatcatagctttgcgacgctctcgcttttgtatgatcttgtccttcttctgggacttttgaagcgcgcgcttttgctggtgagcttccgcacggcgtaatttcttcatttgatttttcgacattacagccggggccccctgagcatcttgagttgtaggttcattggcagtttttgtatccttgtgaactgtgaattccgagagatcgagaggttcgttgccaatctgagcgcacgcgggctccggctcgttgctggcaacatcatgagcgccagtcatggccgggctgagctcctcgtgggtggtatcttcgtcgtgatcgagtttggctaattttcgaggccgctcttgctcctccatagtggtatagtggaattggcaagcaaaaaataaaggtgggctgtcgactgactgtagatcaaaagttcaaaaagcgcccgccccgaaactcatcgaccaatgacctgcgccgcagccctcattactgtgcacaatccacgtgactatccagacccaacttctccaatcgtcacagcgactccacgctatccctctaagccctttacccgctcattaccgtcacaatgcctcaggatatgcccccagcggggggctacgctcaagtccagtacaaggtaagccatgcaaccgagtttccgggcacccaaggccctgcgcacccagcacacagacatccaagctaacggtttcgtttcttactcttcatagcggaacctccctgcccgcggcttcaagcccgcctactacatgattggcatgcacgttatcatggtctacggtttctacaagtacttccacggtgtccgtgagcagcggtacgtttcatccagcaagagactcccttcctgcctccgatcgatccgagagaacgaactgcaattggaacccgatgcgaacctgctagttgaagaaataagcgaattcaatggctgatatgtgttttaacgatagtgagctggcccgtgagaagatgtggtctcgtctgcacctcactccgctcctccaggcagaggaggaccgcgaccaggtccgtcggcactacgccgacaaggcgcgcgagaaggagcttcttggtaccgattccaaggtctacaactccgaccggtatgtttcatgaaagcgcagttggacgctatgtcattctcggtttatactgatttcgcttgccttgacagctttatccgccctaccttcgcctataccccctccagtctcactcaatagacagcctgacaatgtcacccttattctgagcgatattgtacctccgttacctccttttgactctgtatgatgccggtgttttgggatgcttggttgggtgaccccttgcctccatggtatacggactgaactgggcttttctgatcgtttgtgggagagctagaagcattgtggtggaagctggggtgaccttctcgaagcgaattcgaggagaacattgtagatattacttgcctagtgatggcttcagtttggtcttttgcaatatgtcttatttctttgctcgttcaaaatcttcataccctgttagaactacaaataggccgatagtagagaaagttatatatttgtgtctaataatatgtgttttttataatatcgtcttgcgaagcgccgctgcttgctaacgacgggggtagttgataaagctgcaacgcagatctagacagaaagcagggcgaaatgtgactgcgaaaataggagtcggaccgccaatagtgtacagaatagagagggaccattcatcgtgtagaatgaagattaacaggcccaatagcaccaccgcatatcccaacctttcgcagtccagaaagcagatgatgtttggcctatccaaatagatcagcaacaccaccaagatcgggaccatcattaatatcgacacggtggttctgctgctgagtctccatctcattggtcatgtacctctcctgcaatgctgaacgagccttacgacgttcctcgcgagaacccagcatcttcccttgctcggcaatactgatcccacgcaagggctcaagaagatccaagactaaaccacgctgcagccttggtgaggtagtgagatgaagtgctttttccgtattgatcactttcgctgcgctaattcctggcaaagtcaggaaaacagcacgaggggtctcgctgcagaagctatagagacaccaaattgatgcaattagctgagccaggtccttttgcatatcgacaaagtatgattcatgtacggatgaaatgcacgctgtgaggacatcagtacatatgaactcgcggatggtcgcgatggtttgggtgtcctgggtatcgttcgtgggcacaaagtcttgcagaattgaccgaatgacgcgggtgataatgctaccgctacgcgtatcgcgcatgcgaagagcatgcgtacagaagagcatgactggctcaaagatctggggggaggagaggacgaaatggcggatagaatcagagaggttcggtgtcggcaggggtgcgctaggatccgattcagtcccatctgggtctgagaagtcacgttccgtcagtatcgagtggtttatctctattcgtagctggcgggtcagggagtgtttaccacctctctgtggatcgaatagactggctaccatgatcacagcagagtaagtcaactggcgaaggacactttcggacttcatctccgtagtgagatctccgtccgaaattccattcctgcgttgttcaatgatttcccattctgtggtgactttacgatcaatattcgtgaacaaagccgatagcatgggaggcaagaattggctgcggaattgcacagggcagtcgtcaatcagacaacgcgagatgttgagaagaactgagaactggtgggaggatagatgcggtgagtcaacaaataatgcttcagataggggtcctgggagttcggcaaatccatagaagtgctctcgcatcctgctcatgctgaacagcatggagtagcatgcttcgcggacagctctgacttttcctcgaaccgatgatgcaaacccttcaagtgtagactttgatgttgtgattctggcgtagaactcgtcgcggctaccgatagaaataccagcctgccaaaatcgatctgtgaggatacgttcgactaccggttgcatgccttcgaccatattccaattggcaggattgtggaaggcatgggcgtgtcttagaattaaaagttagcttggtggcatgaatcagcattagcataaataattacctgacaagctgcagcagagtgggaagaatgagagggatcaattcgtgccacatatcgcaggcgatcacataggctggcgcagattttttgactcgatctgtggaaacggccaacatagtcttagtgccacgcaatggcaacagctagaatagaatgaatcagattggccctagcacggggaatgagatttgtacttcttacctggaactttctggtcatctcttcttggactaaccttccttcattatccagtgcaacctcggaccagtctgccagtttctgtgcttgtttagattgcatgtatggaccgacattttccagtccaagcatattgcaaaacccgggaaaagtggagctactctggcgaaattggtcgtcttgccatgactctcggatgggttggaggaatgcttcaagtcggttttggcgcagataaggatccgcattgattgcgcgttgcctgtattgagtcagtatgaagcaattttagatagagtagacaacaggaaggggaagaggagttacataatgatgagcaagatagaagtcaattccatttgcaatttatcatcgacacggttagccagcgtgatttctttgatctttggctcgagaaggtcatagaaggtctgcagtgggcaaggttagagagtactggacgatcgggatgtggaacatgacgtacgtagaaatagtctgcataacgcatagccaaccgacgaagttcagagcttgccaatccatgaagctctttgacagcctcggaatacaatgggtattcagaatgatctggtaggcgtgacattagaatgtgttccagaaccttgagcgcaaatcctggatgattgtccaaagcccttgaagagatgtcgacagccaatttgatgactctttgtttaaggaccggatcctatatgaacagatgagttgagaaatcccttgggtttgggaaatatgacatacctcaaaagaccttagcatcagacttgaagcccagttttccaccgcatgttctaattccattcgtttagattcctgtcagaattagcaaccgatgattcattttgcgcttcatcctcttacatcacgttgtggtgcttttccgtgagccgaaacccacttgttgtagcccttgatgacagcctctaccactgcgaactgagcatccgctcgcataagaggaatcgaggatttggtgaaagtttccactgtaaaattaatgagtcgcaaagtccatagctcattagattgttgacactcactgctgaatggctcaacgccgctatacaagttgtcgagattggtgtccacccgggccagaatttcacgcaccgcttcttggggccgcttgaaggtgataatttcgatgatcgaggaacagtaacggcggtaattgccaacaaatgcatgtcgctcgggaactgtatcaatgtcctcgagtaagaactgcaccgtgggatcatcggattcagtcgggagacactcccaacgaagaagcctctgggtacaaatgttcaagaagtggggagtttgttcttgcacaaagtccatgttactgatttttgagtgctgtaacagtctggaccaaagatgcaagcaaggtatggagaccgtcaggctctggtgttgcatgatgttgaccatgaattgcaggaatggcggcaggttcaaacggtccatggtagaggccaagaacttggcatcttccaggcatcctgcaatatatgagaccatctcagagagctttttggagataagatatttgggatcatcaacgtcatccggtccgacgattgaccattcgtaaagcccctgaagaacaacaaggtattctgactcaaaaatcagacatactaactcgtgggagtcttcagttccgatgttggtccttccataaagtgcatgaagtgcttcgattgcagagagaaccacctgctcatcttgacaaggcaaagcccggaaaatgctgggaacaacctgggaggcaatgacagctttatagacggaccatgacaaggcagatctcaaggtggccagagcctttatggccgcatcacgggcctgtttggagctagagacattctggacgcaattgtcaagaaattcgcggattcgaacgagccagccctcctcaccacaacgtggaatggtggggttagttttatccccagtgatttgctctacgatgcctgcaggggtaaagatctcgataagcgaccgattgagctcacctccccgtagtgacgaggcaatatcttctcggaaaaagacatcctcggaaagagtctcaagaacagcgaggataagctctttatgaacgagagatgcaccccagaactgaaccatgttggcatccatatccatccaatccagcccccaggtcttcttagcagcctcggcccacagctgggagatcttatttcggaaataggcagggtcttcggggcggacgttctcggcgagttgcaagatcatcatgcgtaaggtcttggcttcttcgggattggtgaagttgtattggcgaagaacgtgatcgaggagagtcagaccgaagtatcggacaacgggctcatactccatacgagaagccaaaaggaagccatttcgcgctgcggaatcagacgctttaaggttctccacgaactgcgaagcctcctttcgtatgtcgtttgacgatgcagggttgtgaatgagttgcagggcacggattatgtcggccatgccgccttccgacaactcctccgcagccatcttgtcgacgcgttgtagaagaatttgatgaacaaaaaagttaagtctcaatcccgtcctaatgtagtaggccgcgtctcatagctcagagaagataggtaagactcgtccggtattagtttagcagtcggacaccgcaatggccatccacacgcgccactcgctctttccgggtgtagggtggttcgaggttgaggaccggactcgaagttatgaatcgatatatttgcaatgcacgtagttggcgaagtagggtcgcgaaatggatgactcgcagaagacaattggtgacttgtcggctgagaattttccctgaagatcaacaagggcacaccgctcacccgttgatgctccgctgagtccgctcttcctccagcactggatagatgactcaatggagatatttcaatgttaaagaggatcagctaggtaacgactcgtacgatattttttggtttccttgttaataatatatgctgatctgcgtgattttggtgtcatcatagctagagctatgcccctcatcattgtttatcttatctcccatacccggtcgttgtatactccgacagacctgtcacatatatatacacttttgagtgagcatcaagatcggtcggaggaccatttgatgcccttggatctgaagaggcagtagaaattaattcaatataatgaagcaattgatttcaaattggcaaataggaacttcaactctcgagatacaactagcaatttcacattatgacacactggcccttctggcattgttccagatagctgacatcttggcctccaggattagcaaactccccaggtttgcgcttaagtccctcaatcttgatatcctgttgtccttcggcatgccaccatcgcaggcgttgtagcttgacaccctggatgtcctggacgtcaatgtcccacttgccgccgctgactgcaaccacgatgttactccctgggaaatggaactcaggaagataaatttcggtcgggccagtcgcggcggttgctccttcagccgtcagcgatagagtaaaggcacaattcctgagatcgaaaacatgactatccaactttccgctcacgtatgttggactcgggcggatatatgcctctgcggcacgatagccttgctgtcgtaaggatgactgggagaggtcactggagatcgagggagttgacaaagcacctttgagatcacgaggtccaatatttggctctgttgagctactctgactttcggagtaggccggggaatgggtgtcaagtgggcaggtggtggatcctgctggcagttcgagatcgtcgcgagaatatatagacaggtcctcaccattccagtgatcaccccattcgtggtcgttctacgccgtgtcagtaccattcatgttctgaggggcaaatacacctacttgcgtgacataaacccacagagtaaagccattggaagtactgccctccagtgcaaagtgatttgcatccatagcgctggtttggctactatagtctccagtcttgtacgcatttttgtcgtccatgtcatatggaatcccaatctccgtaaataccaccggatgactgcccatataaattcggctttcatcgcggaggaacttgagctggtcacgcaaacagttgcgaatggccgtctcgccaactttgagcgcaaaggcaggggtgaggtacttgccccggagaacaccaataacatccacattgtagagtcggttcctacaggagtcagtactgccgacatccgattgaagtacctcgaccagagcttaccaatgttttgtcaaaagagttaatccatcatagaaatgaaccgcatggaccatattagggtcgtcatcagcagtgccgttaagatctggcggtacctccatcacaggtggctggcagaacattattgcgtccggccagattcctcgaatggcatttttgtatactcggtaatgatccaagaaatatgtgttggtaaatctgtcatagtcaagtggctcacccgtctgagggttctttgagaagtaatctttccgtagaagggtgtctgtggccggatcccaaactccatgctgagcccagatgcactctccaagtttccacccagggtctcgttgccagccatatttgctatcatcgtagtcagttggcaaccaggctatctcgcctgccgggtctacaaggtttgtgccagtcttgtagggaccgaaatttccaaatgcccatgttgtctgttcgcaagccttgcctgagccggtgagcattgcttggaatgcggtcggtgaagtcccaagttgaagttgctgctccggcggaattactgaaatgtcttgaaaaccaatgatgccacgatgaggctcattcatgctttcccagccaatgatcacttcgccatcaagatcacccgcttcatgaattcttcgtgctaagtatgcacatgcatcaataaagtggttctggagataatcttggatgttcatcccatcgatgattgccttaggagcgaaatcccgcccagcccaaaacaaggtaaacatggtttgacaaaccagtctagtataatttgtgctccagatcatcttggggaactcggccgggacatcgtatgtgttttgtaccaaggcggcttccgtgtctctgaagcttttagggtttagtcccgctgcatagagcgtccacatcggtgccccagatcctcccgagaacctagaccactaagaaggggttagcatgaagttgtaagctattaagctattacccgggtgatcatatatactcaccacatcctgatgcgggtccataaagacccagaaatcgtatttcttagctatccggagaacttctatggtgtatgcaacccactcatggtcgtaaactcccggtcccgcatgctcaatggcttcccaggtaaagatgtacctgatagtgttataaccccatttccgaagccgtttgaaatgaatatcggcatctttcagtgggaagggacgtccaacaaatgagacattgtccccgtcaaagaacttctcggcaatgtatgaggggatgtcgggtgtctttgggtacttcgcatcagccgcaaggtttatccctcttagcgtaacctcccgattgtgaggatctcgaaagctctgtccctcaactctcagatgtagaggggccattgttgctctggttctacctaaggtcgagttgaatgaggtcgtagtgtcacgcgggagttcaagggtgggcaagttgaagaaacgaagtatagaaagttcacagcaggtgggtctgaaaataggcaacgctttccgattcaactcgactagcaatattgaaatgcgaacgagcgaatcttggtaacctttcaccaaggtcacaagtgccaagcttgcccgatacctgcgtgcaagtcactagaacacgtgattctgaccacttcaagaaacctcgcagaatactttgactcctcaagttgtgttcagcacgtcttctgtgatatcttcaaagtgattccttcttttatctgtcaatccagacgtccaacccaacagtgagctcattgccaactcgaagatcacctgtgtccacctttgataacgataagaagtgacgtatcgcgagctagccgaccgctttgctccaccacgacagattctccccgctgtctctgcacaacgggaataatgtcgagcaaagcggcattgaaagccgtgcgagcagctttggaatcgaaagattaccaaactgctgctgaaaaggccaaggagcttatcaagagcgagccgaataattaccacgcgtatgacaatccctgatccttcatgaaacatgactaactcggtttgttatttttttctaggaatgtcttcctcggtctcgccagcgatcgattgaataagaataatgaagcggaggacgcttattccgctgcgaccagtatcaaccccgacgataaaacggcatggcagggcttgatctccctgtatgagaaacagggtggctgcaacgatgatggttatcacaaggcagtcattgctctcggaaagatattcgccgacaagtatgcattgattccttcttaattcctgtgtacgaaaaacatagtgctgatgacttctagcgacgagcaagaacgctgccaagatctaattaacaaatacacgaagtcgatgaagaacaaagggacctctcaacacaagcatgcattggaacttcagataccgggctcacccctgtacgattttcttgaggggcggttgccccgtccatcccaaacataccagcgattgatcgagattaccgagcgtcaagaaagagagtttatcaatcgtgagattggagagcgccgaacgcgtcttggtgctcgcatcgaacaagtcacccaggaagttcggagggaagcagcgaacaagagccgattggaccaattctaccaaggaatgattgattggaccaacgacgatacagtacgccgtcaatacgaggagaagttgtttcagcgtgcatatgaggaactcggagttctgcctgacgccgagaagggggcgaagagagcagccgtttttaaggcagcacatgacatggtaatcataaaacatccgttcgaacccgcatggaaagtttttctggggtggcaagatgttcaggatctctcccagtatgacgttggccatctgcgtgagtacattgagttctttccagaatctgggctctcccaggttctcaaaggattcttattgagcgaactatcgccatttcccaaggagccaacggacgaaacaaaaggcaaggatggcaaggatgggaaggaaatcacagccaatcaacccgataatgaaaacgatgacgatgcaactgttacccaagaccctctcgtacttatggtcgagggcttggattccgctcgcgattcaattcttgcccaccgcataatggcagatgtctacctctctttcgaagagtatgagagcgtggtcaatgttgctcgtaaggggctactgtacatcgagaacttgataaagtacagtggagtcaagatccccaacaccattgatgccttgaacaacgcacttgccaatgccatgatttattatcaatccccccggtatcacgcagatgcgaaaaaaatatttgaggacatccttgaacggaacccaacctcgtccaattgcctacttgggattggtctgattttgaaagaggatcaggactacgcagaagctgtcaacttcctgcggcgatcactagcacgtgattcttctaacctcaagattcgtggagagcttgcttggtgtgaggcattgcatggtgaccttgaaggtggcctagccagtcttcaggctacgcttgaggatctaaaagaagctcaaccggacaacagagagttcaaatctgagcttctttaccgcattggttactgccaatgggagcttgatccgtccccagctgcccgcaaagatcgcagtcgtgcttatgctagcctctttgcttccatccaggcgaatatgaacttcgctccagcatataccattcttggtttctactacgcagactacaagaaagataagatcagagctcgtagatgctttcacaaggcttttgaactgtcaacctctgagattgaagccgccgagcgtcttgctaggggctttgctgactcgaaggaatgggaccttgtcgaagcaattgcgcagcgagtggttgactccggcaaggctaggccttcccctgggtcaaaacgccgagggtttagctggccatatgcggcattgggttcggttcaggtcaacaaacagcaatacagcaaaagtattgtgtccttccaagcagcgcttcgactcaagccaacagattatcactcatgggtcggtcttgccgagtcctaccaccactctggtcgatacaatgccgccaccaaggcctttgagcaagcaaagctattggagccagagctttcagctaaagaccaggaatatgtatggtttgcaaggtatatgctggcaaacgtcaggcgagagcttggtcagtacgatgacgctatcgctgcctacgaagatgtcctgaaatctcggcctggtgacattggtgtgactctcgcgcttcttcagaccttgaccgagagttcgacgaagagccttggcctaggtctcttcaatgatgcagcggagctcgcataccaagctatttcggtggccacctccctagtgcagattaaaagcgacattttcaacttgtggaaggctgtaggcgatgccttctccaacttctcatacatgaaagctaaggctggaaagctatccgctcccagctgcaaggctttactggcagtcgatctggaccctatggcccttgatgtcatgaccgatgttgatggtgtcggaactgattggctcgcagccaatgaaagcgaagagtcgatgccagctgaattctacgttcacttatccataatcgcatttaaacgtgcgctgcatatttctgcgcatgatgctcattctcaagcagttgcctggtacaaccttggttgggctgaatatttggcctatcgcactgtgcagccggatccaaccaagaaaggtaagaagtctcgcaagttcctgaaagcagccatgcggtgcttcaagagagcaatcgaattggaggcgagcaattccgatttctggaacgcgttgggtgttgtcactgcaagcatgagtcccaaagtctcccaacatgcctttgtgcgaagtttgcatttgaatgaacgcaacgcgcaagtttggacaaaccttggagcactatacctcctgcacgaagaaggccaccaatcatacaagacgttcttgcgagcgcaggccaccgacccagactattcattggcttgggtcggccaaggcttcgtatcacttattgttcgcgagacacaggaggcgaggggttacttcgagcatgcctttgacatctcaaactcatccgatattctcactaaacgccagttcagtctgacccactttgatcatctgaatgcggcctcttcatctaacgtgtccgaactcattcagccattcttcgcactgcaccaactctgcatccaggatccgtcaaacctgccgtttgtgcacctttctgccctgttagcagagagaatgggcgagaccgctgatgccgagtctagcctggaggttgtctgtgcaggcatggaagacgagtttgaaaagacagagtccccggcttccctttcgaggtattcccaagcaaacgcagatatggctcgtgtcctccttgcacgccattcatatgaaaaggcagcagagaaggccgagctcgcgcttaccctctctggggaggaagacgcagagaaattcgatcccgaagcttgcaagaagcttcgtctgtctgcgcatctgacagctggtctagcatattacaacctgaagtctatggaccaagccatcgatatgttccgcgatgccctcgaagaggcagacaatgctccagatgttgtctgtcttcttgcccaggtcctgtgggccaagggtggtgaggaaaaccggtctgttgctcgggagcaactgcttgactgtgtgatgaaccaccctactcacatcggagcagtcacccttttgggtgccatcgctctccttgatgcggaccgggacgccattgaagcagttgaatcagaccttaacagcatgatctcgcgtgatgacatcgatctccacgaccgagctaaaatcatcaaactcctgagtgccatctcagcaacgggactcaatgataatgcagccgttcccgaaagcatcaggcgcattggtgatgccactgctgccgtgatgcttacaccgggccaacctgccgggtggatggagttgtcggcagcatcgcgaaacccgtacgcagccgccatgactatcaaacgcgctctgcgcagcgtgcctccttacggtaatctcggggctgaggacctcagtcaagcctactcgcaaaccggcaaggtcggtgacgccttccgagcgatcatgattgccccgtggaaacgcaatggatgggaggaactgagccacaatgtgcctacccggaacatgtggacacgctgtacgggccataaatcagaggaatcggacgacgacaaacctctcctgccatggaagcgccgcacaggccatggacctgagtagtcggacgacgatttgactaccctgccactccacaacaacaagcgccgtacaggcgctagggctaaatgaacttgatgcacagtgtatttagttgaaatgtacatcagcttttagcgaatgaacatcacaacatcaaattcataagaaatatatccacaatagactaagagaaatgcaaagtccataccttaagattaattgcgaagtagaagaagcacactccgccatctgttcagccggttgagcccacgatgactcgtgtttcctcattccccttcggcgcctgcggtcttctccagcaacctagccttcctaccctccctccacggtttatccaaagcctcaatcttccccccgagcagagtaacagaccccggggaaagcaacaccatacctctcgcgacagacggattacgaagcaagagcttcgccccaatagcaagtttctccaatgctatgccatcgatacgctgcatttcaacagccaccgccatagttcccgccgcatcctgaataatcaggcggtgcggcccatacccactgttcccggatgcagtcgcagcaccgttcgaaggattgttattcgcacgattattctccgacgcctcggggtcctcgcctacagcgattgtgcgcacgatctcacggccgcggatcgcttcgccccgctcaacgcgttcaattgcttcgatctggctccataggctcgtgccgatgtcttcgatgtctagcacttgcacggggattgagccttgcagccgtcgctcttggaccgccgggtcgtgaatatcgactgggagtacgcatgatctgtgcttggagagtgattctctgatatcagaggcgaggagacggaatatagccgtctttgtgagggcggatgcggggatattgcgttgcgctgtgctggacgataataggaaggcactgagccagggttgggcgactgagagggatttggtgctcagtatctgagctgcaatttgatcaggactggtcatgatgtattggactccctcaggatcatattggcgcgtatggttattctaagggaactatcgaagtcggggaagctctcaacgtgaaaataaagcacagaccaccgcttaaagcaattgacctggcccgactctgttacccccgacaactccgacacacctcacgagacatcgcaatgtcgaccatatcttctccacgccaatccctcgcctcctctagagccctttccccgggtccagcctcctcccgcccatcactcgatgccttgaacaccagcgtcagcggggggctcagcgccgcatctaccccatccactgcacgagctatttccccctcactccatccccgacgcaatcgaagtgccttgcgagactattacaatctcaagccacctggggcgggcacatctgcctcccgggacgcatctcgcactcggagtgaagcaggagacatatccgacccagccagtctagcgtcagggacggagctcgacagtgcaaacttcgacccgcagcggtatgtcgagcacctattgtcatcgtcgtcgctgtctacggtgctcaaggcggagaatacgttggttggggatatccgcactctcgacggagagcggaaagcgctggtctacgataactactcgaagttgattcgcgctgtggagacaattgggaaaatgcggcgcagtatggatgatcgcggtgcgccgttgacaatgacgaaaacgctgggtccggctattgcttttgttgctgagactgccagtgggcttattaaagaaggcgaggagcaacggcggctgatgaaggaagccaagctggaagatgggacttcgagcaagaagagtgagaaggatactgttcggtgggtgctttcttcaccgcagagattagagaagcttatggcggagggtaaagaggaggatgcgcaaaaggactggaaagagatccagcatttactcgacgcttggggtgaggtcaagggggttgctgaggttcggacagcgtgtgagaaagtcatgaacccggcacgcaacgatgactgagcacctgcttatacatacctttcttcggccatgatccatgtgattgaagctcttgacaattgacttttgtcgaagtgagctctcacttttgactggaacagcggttgccaccatgaatgagctggctcattcatgaagatagatcgttcctgatctatacaagacatgatcagtcatttgtcccgacgaacattctacgaaatcaccgctgccccggcttttgggaatgccttggacacacaacctagacagagacaaatacagtacatgtttgaaagtttgtgcgctaatcctcgccgagtcacggctacgtttcctatcacctacgacgtcgtagctgagacgacgaaagcaaggagcccatgtgagcggaagagaaatgctggaagaaagatgaatttgcctctttggagaccacacgggcagttggcggctaagtcctggcggtaacgttcgcacaagcgtctaacgttaactcgccatcttcgagggcagacgcccaaaccgtcaactttgtttccgccttcaaccatgcagaaagcgcggtagtcacctgctgttgggcaaaggttacatctaaacagcgttccatccaatcaaagcaaacttctcgagcctctgtgggcaaagtttcatcgagtccatatatgatgaagcttgcaatcgcattcagggactttgcagtcgtaaaatccttggtaactaaatagccaccctgtggcatgagcacaacctgccgggatgaatattgcatgtgatgatgtcgtcaccagaacaacgcctccttccagttgatgcgccaagctgaagtaactttgcacgctggccgtcaacggtcttcatagcattcaaattcttattcgtggcttgggtgtttggtcactgaccaaacattgtgcctttttgacctgttagcctagtgatgaaactcaagcaaccgcatccctgacactctcccaggcatgtatcatatagttcccgggagcgactgtaggcgatcctgggagtgtactcactccgaggagcttgaccttttactcctaggatcatgtcacgctgctcctgaaaattgcgcgctgctctgtgaggatctcacgtatgcgtagttgaatgatcaatattgaggaagctattgtctattctagatacaagattattttaaatacaagacatagcgcgaggaagcgaagaaaggatgcctcttcctccgcggtctcattggcaaagctttctcttgctcagtggcctagccttaccagcagcctttcggcgcgttcaactgcccttgcagagtcgcactggacgaacttcgtaatgttcctgccctttgcaaacgccattatgatagcagccattaagacgaagggccagtcttccacccttggctccccatgccggtttttgttcaccgcacaatgaacttcaatcattctctcaaacttgtccagccacatacacagccccggctgcgaaagaattctgaaaaatatctggactgccacaaaaccccgtactctatcgcatgatggagtctggcccaacttgttcttgtaattgaccatgattcgagggaccgaaaggagaagttggaagactggcaaatgtttgagaaaatcaattgattcaaaacaattagcttacgtccgaggttttcatctcaaacgatgtcataggtctgagaggacgtgagagcttcagccaaagctcattatccggatcatcatcatcaatatacaagtagccagtatccgcgctatcaccgtagactccactgtatgccctgtactcatcttgaatcttctgcgcagtctcagttgacagccacatatatctctccacaattcccgggtcgaccggcagaccgccatagataccaggggagtcccattcgcctctgggatgctgcccccaaggaacagccatatcagaaaacttgacagaggaatgggtcaaaaagtccctgggctccaaatcaggccccaaactcgttttcttggtggtgtcataagggtcgaactctgagatttttccgcttccaattgaacgctccctgacaaactcctccagatattgcaagtagtaagggtttctgctctgtttggcagcctcgaaataggactcacggggagggggattcaacgccatgaaaagcgattggtagtcacaaagtatggaggtgatcgcaatttgcggtctcatggaagggcacttgccagccagctcacgcaaagtgttctcatgaggccgcacaggccaccagataagccaagggaggcagtcagagtcatcgtcaaggtcagagatatcattgttcatgattctacgagcatttatcgcagtgcgaatctcgcgacgctcgcgctcattgccttcgctgagcaatttacctgggagaatgattcgcccagggttggtttccagctgataggcccaccatcgggcaaaacttgtatggtgataaatcccacgaagaatacaattgtattcaatttctgttctgagcctccgtgggtgcatgaatcgagcgtatctatccacattaccctcccatgcagccatttgcgttggaaggcgtttgtcaagaactggaagatcaggcgaaagaggcatccacaaatcctccgagtctcctgggccgagtatcgcatcgcgatctatttcaatttcttcctcgaacccaataaatccatcttcctcgatgtcaatatcatctgcagttgtatctggcaagttctctggaggaagaacacgctggctcaaagcccgtcggggcttcatattgccgtttagaaatgcgggtgcttgtgggcttgtaagattaaccgatcgagtgaaatcatccataacagcccatctttgaggggccgacatgatgattttgaagatttcggcgtcttcggcagcattacaggcttcttcagcaatagagacgtctggcagaagatccaattctttgtaaagatccgtatacaaagcagcagcacacgcgcggccgacttggtagcgcatagatggataccgactagcgagctcgcgataggtttcttccgatgcaaactctggataccaaatgcagtatggctcggtggcaggttgcatatcggggatgacgttactcatgatcaggcgagcattgcgcgcgcgagaaaactgatgtgcatcgtcgccggaacatagctcaatgattgtcgggcttgttgcaaattgaagtgagtcacggatcccgcgaatgactgctctacgatgccaaaaagaggtcacatcagacgggactttttcgccctttattgccgcgatgcattggtcaaggtcgtactcagcgggttgttgcttgcccgcgtggactgggaggtccgtggaggaaatgacagagctttgccctgcaacctgagtagctgccatgaggataaatagcgcaggggacgtcaggctgacgatttacggaaggggtctgcaagaacttgaggaggggaaaggcggagcgtacgcaggaacataggggccagggttactttcgtttcggatttaatgcatacaatggtgccttcatgtcttaatttggatacctgaattacaattacagaggcgtgtctgagaattaggcccataaagctatttctgccatacaaatccatatatcgcatgattcttagacgatttgaacctaaattcggaggtaatagcgatccaatgaattatggatatctcttcagagaaaataatacgtatagattcggggtgttaaaacttatgaacagtcactgtacggatactgatttgtaattttacagtacagcgtatgcagggcatgcagcattgggggccgcatgcccaggtggacactaatctgattacatggcgaataagacaaagaattacctaaatatttgctggtacaaccccaagcaaagacgatctaatccgaagaaagcgatgataatgcaggtacctggtggacagcagagcgaatgacggacgtgcgtggcagaacccgtgtttactaaatcctttcgctcacttcgttcgtttcagggcacaactaccatacatacactgggaactacgtttcagttgactctgatgcggtgctttgattctggctggggtctatttaatatgagagaaacatactagtagctgatgaacaatcgatgctggcaagtactggggctcgttactactggtaatacatcgagatgtatagggtaaaacttactagtagaataacaccacttgaattgacaactttgacattcttgtagggactttccggcaagggaagactttgtaaataacttcggagatatatctctgagaaaacagttgatgtccagatcagatcttccatgtcagaattctgttctatagagccccttcctatatggcgggcacggcacatttgtcccaaaaactttcccagggctttatttcttcccagtgcagaacattattgtcagtgtttgccggaccaccggtaatggcgttgcggttcccaagttcctcgccctatgtaccagcattagcgccctgcgagatggtctttgagagaaagcaacttacccaagccataaacttgtcccaggtggtaaggcccttgcctttgatcttttcagtgttggcggcaaatgttctggggaagtcaactgcttggtatcgtggcatgcctggaacatcggtatctgcttcggccatcacaacggtgctgcgatattcgccttttttgttgggatcagcttcttggaggttccaaccctggtcgctagatagctctctgaccagccaattgtttgtctggcccttcctaagagccacaattcggcgggaaatatcctcggcgcggccaagacgatcagaaacatccccaatcgtgatcagatgcctatcatccttgacagccgcgaccttctgactgacagttctaataaatcggatgtgcttatctgcgtctgactctgagtcacctttcgaccccgagcctccccctccacttcctccaccccggcctgagatgaaagtgctggccttttcttccaactcagccaacttgggactgattgtcgatagtgaaaccgttcctttgaagttgtagactctattatctgccaattccttttgcgccctttggaggtccccttgagatgatggctcagttatggcaggaggaggctccagattagaaggtttactgagcgttctgagcatgaattccacataattcagaggcttgtccgtctctctgccgtttgagtccagatgtcggttacttgttcctgcgggtcctcttctgtctcggaaaggaaatatgagcttttgtctttcggcggtctgaatttggctgtatgaaagtgttgcaaagttagccatgacaacctgtaggtcactcgaaatattactaggacggcgaaaataacgtacacaaaaatctgataggcttcccacatgaacattttttcataaatatgcgcctgaagattgaagtcggtgcctttataattgttaagttcgccggggctgactcttcgatggtgggtgtgtgaatgatgattgggatgagaatgggccgaacagcttaagcccgtaagagaagcaagccatattataacgagtcccagaaaagagacctgggatgcccggaagagcatattgacagttcccaccaaagatagtcaagtggttcttgaggtaaaagtaataaggaaggactggaggatgacttgaaaaacgggggcagaaaagaacactaattcgttttatgcgatgtcctattgccccctctcccaaatgaaaagctccaggataataggttctatttttacggctcgattttgttcgaatttcggctttttggcgattcatactagcaaccagtgacggtcgcgcattgggcaagttaattttacttcgaacccctgaataggacccagactggagagaaaaaagaacaaaaacccgaaaaaagcctgaaagaaacctgaaatcaaccggaaagagggaagaggcgtgctccacgaggtagtcttacatcgtacaggtagagtgagtgggacgctgctatgaccaatagtgctcatttatggctcattatgagaattcctttctcaggtagtcccatcagtctgccagcctttgccagaagtccaattcaagcgtagaacgcctgaccgctgtattccgtacgttcaaatatgcgaaggtggagatgggattagtagcgggacttccgacaaaaactatttcaaaacttattcttggtcttatcttctataatttccgagcgccgcatcttacagggaaacaccgaatatcaagtgataagtgctgataacgtacttcaagtgtattcaccaatttaccccaagagagtctcattgctgctactctcagtcaatttcgccaaatcatccttcatgggaagaactattccatggctgagactcgatatggagtccaggcccacacgggaagtctctgtagatcaatcggacgctagtgttcacgcgatctgctgtggatgtaacctgggggcggaaaaaaagcaacttggggggctacagcccccggggccaaggctggcatatacatattagtgtactgacgccgcgaatcatttggacaggcctcatggattgcctccactctccatatagatcctgcggaatacctgcggactgtctcaggtacccggcagaggcttaatttcaagttttattcgcgcacgctatcgcttggaattagtctggcaatcgaaaccagccctgcagccccaagaccctgtatttgaggctgggactgtcgtttccctgaactaaagaccctaatggggtagccataaaagcgtatgaaacatccgaatgtctccacttgtactagtagtggtcttggcattagactctgcgtacggagtacatactagcatataccaatgtactagtctgggtatgaaatttcactctttctcatcgagaaggttggatccgttgaggtaaatctcctttcaaggatcagctggaaagttctggattggggcgcacgttccggctttattccaaagtgcatcgcggtacggtcctcagatgctgtacgggctgatgagcggtcatttgattgtcattagcttcataatggttgacccaccggaatccttgaattcccacagcgtatcgttccaaatttgtcatttgtcgtcaggtttgctcttttccaaggttgatataaatgttccaagcctactgggaacccgggcagtgatcagcaccacagcactttcaagttcttttcaagtttacgttcattccaggttatcgcctggggtagtatttgccttcattctttcacgatgaatactgcccttggggatttcatcccttttctttccttgagttttctctctcttttttctgttacaaatgccttcacccacacttcagcaagcttgaatgtcttgcctgcaccgggttgcccagagtcctgctcggttgtcggctcaaacccgagcaattggacctggattgttcgccaaagtgatttgagcatctgtgaccagccaatcctatttgatttccattttggagacgactcgacttctgattttgttgtacgctcctgtgctgtcctcgagcctttccacgagcagattccaagctcgaatatcaaagaagcgaaatggaccaatatcaacgtcactgattcggatgctgtaacacagtcgttgatagtatcgaattcttgtggagcatctcagcaaacttcagatgtgaccgttcaagtgggccctgctggtgctatcaaggataccaatgacgccaatgctgctgttaagaatctagcatcctacatgacaaatgtcgcctcctgtggcttcactgttgttctgtcaaaggttggagaaaccgtcgctgcgctttatgccggagcggatgtctatccaagcagcgttggcccataccttgacagctttaccaaaaaccttgagggcggatctcagacaatccaatcatgcgactcaaactcaaagcaagacacgactattggaatctatatcgtggattcattggatgagctcgaggatatccaacgcgtcttcaagacgtggtctaaaggcgattgtcttagcgcaaacggtgaagactcgataaaaacaaaaatcatcacgttggcatcctctggagtcagcaagcggtccgacatcttctcatcggtcgaggatctcatcgccccccggggtaactgtaggactatacaagtcaaactgggagatggctgtggctcattggcaagccgctgtgatatatcaggagctgatttcaccaagtacaaccccggtgctaagttttgctcgaatttgaaggctcaacagcatgtttgctgctccgcgggcactcttcctgattacacccctaagcctcaggcggatggcacgtgtttcacttacaccatccagcccaatgacaattgtgctgatattgcagccgggttttctattacccaggatgagatcaataccttcaataagaacacttgggcatgggctggctgtggtgcgaacgatctaaagcaagaccaaatcatatgtttgagcaaaggtaacacgcctatgccagctccgctcagtaatgcggtatgtggtcctcagaagcctggtaccaaggctccacctggggactataatggctggaacctcactgagcttaacccctgccctttgaatgcatgctgctcagggtggggcttctgcggtactacagaggagttctgtaccaaatcacccgccaagacaaatgctccaggagcctttttgagtggtaaaaacggatgtatttccaactgcggcacaaagatcgtcaacaacgagcatgctccagacaagttccttcatgttgcttattatgaagtcttcaacctcaaacgcgagtgtttgaatatggatgtcactgagatcaacgatgcatccttgactcatgtgcacttcgcttttgctggactgactgccgactttgacattgcctttgacaatgacgattataaagcgcagtttgaaaaatttgtcaaaattagcacatcctacaaaaaggtcctctcatttggaggatgggctgagtcgactgacgccgcgaccttccagcgataccgtgatgtcgtcaagcctggaaatcgtgacaagtttgcgacgaacatgctcgcattcttcaacaagtataaaggtttagacggtatcgattttgactgggaatatcctggagctaccgatatccctggtgtccctccaggcaccggtgatgagacgaacaattaccttgctttcttgaagctgatgaagaacaagattggagataagtccctttcaatcgctttacctgcttcctactggtatctgaaagcattcccaattgacaaaatggccgagtatttgtcgtactttatctatatgacttacgaccttcatggacagtggggtgagtttaccacctatcttcccgatcgatgaactttactgatcatatatagattatggcaatgccaacgcaaatgtgggctgtcccggcggagattgtcttcggtcgcatgtcaataagaccgagaccgagaacgctcttgtgatggtcacgaaggccggtgtacccgcaaacaaagtgcttgttggaatttcaagctacggccgcagctttggtatgatcgacccaagttgcactggccccatgtgcaaatacggcggttcctttgatgtttctacggccgaggctggacagtgtaccaacacctctggatacatctcaaatgctgagttaaatgatatcatgtcgaatgtgaacgcaagccaggaaggctacaagggccgcgtgtggtatgatacggaatccgcttcagatatgatggtttacggtaccaccggaaaaatcactacgtgggtggcttatatggccgatgacaccaagaacgaacgcattgactgggtcaaagggctcaactttggcggagtcactgactgggctgtcgacctccaacagtggaacctgggcgtggacaccggctctgaagaggccaaggaccttcaactagccgatcttcctaaggggtgtccttccgacaattggccggacagtctcgataagctccaggctagcatcgattctatcgatgtagaatgtcggtctcaggctgttgtttgggttttgcttaaaacaatccccacagttctgcaaaactacaaagatgcatctgaaagctatgatgaatatgttagttcaaggcctttttgatactggtgcaatcaagctaatctgcttctagttcggttattattccgaatgggtcaaggacaacatcaacgattcccttgagaagtttatgtggggtgatggaatgaaatacatggactgtaaatggacagcggacaaagcagatggtggcagtggcaatgatgcttgtacaaagatggttgttaaacagggacaaccaagtcaaggcgttgtcactatcacatatacggtacgcgatgaagatgggttttacaacgcgcttcagaacgattacggtatcctcaaagactggattgtgtgggaggagacgtcgggagatccggaagacgctccttgtccctgtccagtaccaggccactgcattcaatgcaacaagccccacggcgaagtgtaccacaactggccacaaaaggctgccgatgatgctatcaaggttcctaaccttaagtctgtgatcgacactgcagtccccaacatcaccgcacttcaaactgtcatgctcggaagtttcacggagatacgtttgggggccatggatgccaccgacgcagacatggccaccgcgtacagcatgcccgttttcatgcttgcagacacgaccgagcaaatgaagaatattaccaaaatcggcaaggagcagaaaaaggccgatgatgaagcgaaagtcagcttcatcttggacattgtcagcattgttctcatgattattccattcgctggagaagcagtcgaggcaattggtggcgtggcaaacgttgcccgcgctgctttggtcatgggcgaggctggtaacgcggctctttccgtctacgatattgtcaaggatccatcctcagctccttttgctatacttggtctacttatgggagccgatgcctcgatcgtaggcaagtctgccaagactaccttctccaaagccgccgctttccggcatgctatgagtgacggtaccttgaagtctttcagcaaagagttccaggcaaatgacaagatcgtgcaagacattgtcaaggcttgcaaagcctaaatttcatagtttttgctctctatggatgccctacagggtaggcctgaaaggcagctgctactcacaacaaaagcctaccaataaactttaaatcacatgcttataggaaatgcaacaattattgatgcattctgacgtgctcactgtttccctatgcagtttgtagccctttatctgtggcatttattcccttttctttctcttctctggcagacagcttgccgaccaacgtgcagcttgccgttcagcttgctgcgttggcattttctttatatgtctgcagatatgcttcttctgttttctggtggatggaatctggctggctttgtggtgcgaagctatatagacaagcttcagtacagtagttagtttcccatcttccatcaattcatcattaatcgtcaatcaattcttcaatcataaacaaactcataatccctatttcccttcaagaagctcccgactcgaatacatactcgccttcagtccatactcattcttagaggtaatatccagatgagtgaacgcatcagacttgtagtaaatcgacctcggccctttcccaacaagcccaagatcatccaacttactcacaacccgcttaacatcctcgacatcgccgaaatcagccgtatagacacaaatcaaacgactcgctccagacccaccattcgtagcaactttcacagcatccccgagctcccccttctccatcgccctaacaacgacgccccagaactcatcgacttgacccacagtcggaaaaagcatccacttcccatttgtaacacccgtctccctcgccagatccagaatatccttctcaagttccttccgcagcggattcaatttacgcgtcaacgcagccgtagtcttcgccccagacctatcatgcgcctcgcgcagtatcgcactcccattttcgtactcctggagaagctccctgcctctcctaagcagagcgggaacgtccccgctcgtcttcgacggcagatgcgggttgtacatccaaatccaggggcctacgaccgtggtttccgtcgtcgatggcggaagacgcgataaaaagtgatctaccggctcggtcttcccgcgtttgttgcgcggcatgctgtctgtttctggtggtgcatcgctcatacaaacgtctggtgatgtcgcctttgcgcgagtcgacgacgcgcggagatgctgctgcatggtggatagcagctttgggtgagttcctacccagaatggctctgggtcgtaggatgagacttgtgcttctagtttggtcttttcgtcgtcgtcgcctgatatggattagctgggtttcggggatgggttgaatatggaatgggtttaccgtagaagcttgattcgtcggagaatatttcatcggttgctgtggttgatggcattacctaggcgtcgctggatgatattatgatgctctggtggttcttgttgagaagtagttggagatggggggagtagttgagaagtagaggtgggcccgcatttgaatttcccctctcgcgactttacgagttcacctgttaatgtctcatagtaactaatactttgatttgaagtaataggaagactaatttaataagtatatgaatatgacactctttatgcattagctatccacagtctttgaatatatttatagcagcatatattctactatcctacttagtcccaacttattcggctctgttaatatcaattcatcaagcctttctagtgccgtgaaatgaccaccctataatattatgtctaatagtacactaggcgggtagtaggaaatctccaattggggtctttagtcgagagccttttactatttacacgccttatgctgtatttgaatcgcaaagcaatcgattattttagcaaatgattcttaagtaaagtagagtagaattttcaatcccccctctcccttttaaaagtccgctgccaccaggatacctggggggcgggcttcaatttcaatgggcaaaagaagcaatttgccaaatatatagtgtaagccgaatattcttttagataggtgccttcgttcacaacatccacattcccgactacaacattcacctcgatccgaacaatcctggaccatttcttcgcgcataaaccagtctgaattacgcctgaagctatagtagaggtctttggagtccaagtgaaacctatactctgcttggtaaagggcgtgctcctttatagtttattgtgcttggatctcttcaagctgcttatttgcgttctcaaattcagttgtatcagagttagacttcccatttgattcgatagccatagcctttggtagagctataaccttatgttgtagccattcctcacgctgtattacttcacatagagcgcgctcggtagttaagaaataactcagtgagtttagaccgaacgacgtagtttgacccgtatcttagatattcatctttttggtaaaagtcaaaggttgtaccaccgaagaatcccataatcgtatttagaaaagctgtaaggttagtatggtggttacacgaatgcagaccgcattgaaacaaaacaagacctcggccaatcaaccgatgaaccgaaaggacaagcatatagagataccatattaatttacacaaactggttaaacatcacaaaagacgccacaaaagacaccacaaaggacgtacataatagtcgtatcgccccggtggcatattcagtcgcccgtagacgttgtacaatcggcgattcgtggttggtgaagataccgggatccaccttaccccgcgaggtataaatcggcagtttctctctctcttgggagcacacaacaatgaccgagccaaagactgagagctcgcagctcgccgattgtagtcatattccgatcatcgacctctcaactttggatagtccaaatttcgatgagcgacggaagcttgctcaatcgatctatgatgcttgcactcaggttggcttcttttacatcaaggtgtggctcttagggcgctcttgaacctgatcagctattaattttgcccgctcagaaccacgcaataccggaggacaagattaatggcatacacggttccgcgaagcggctcttcgatctccccgaggagcaaaagatgaagttttatattggaaactcccccgtacgcctggaaatctgaagttcaaaaatacatcctaagattatactagaaattccgcggctacagtcccctaggtggtgagaaatccacagggacagacgatgatcccattgccgaagaagatgctgtcagcgctctctctgaagcctttgacattggatacgaaactgcaatggatcctcaaaaatcgacagatgaccctcttccccgtgatccctacggactgtatggagataatcaatggcccagccaagatatacttccaaacttcacagagacctatattgaatattgttccatgatgctcgggctctgccgaaagttgatgagaatatttgccctcgcattgggcttgcccgaagaacactttgatgcgatgactaagaacccaggtgtcacgtctaggatgatgcattacccgcctcagccagtgaaggaagaggttcgtgaaggactcggggctcatacggtaggcaattgaccaaaaggcaacaaagataccgaatgatttacttatccgctgtcaggactttgaatgcttcaccattctctcacagggtagtgtcccgggcctgcaagtcttgagccacagtggtgagtggatactggctccgccattgccaggaatgttggtcgtcaacattgcagattgcctgtcaatttggtaagactagctcggtcattcaggagaatgcgtgctgacttatttaggacgaataaaaagttcaagtcgactattcatcgggtgacaaacttgactggacaagaacgttattcgattcccttcttctttggagtcgactatgatacaacagtgtcagttctaccgaatcatatttcggatgatcggcctgcatgtaaagagcccttcaaagcaggcgaggtgagtcatagaatgggttgagtaccgatgtgataactaacgagggaatagtgggttcgcgaaaagctatcaaaggcgtatgttggctatgaaggctaggatactgaatcttattgagacataatttccatcttgcttgccctgctaaacttcagtcatcctgcactggaatatgttgttcaaaggctgatcacttcttcccaaataattaatcccaaccttcaatcttctctaaatccaaccctaggaatccaactagccccggtgaacaagaggagtttgtaagcatagtcgcggaaccctgcacatgacatgacgcagttgcctgatcgagctatgtgacaccagtgggtccacttatatatagattaggtagtctcctcccgcttccctcttctcttctcctcctctccttgtcgtccatatttagctggatggataaaagctacttacttcgcaatgtctttactattcagttctccaccctctaaggcgacggcctcccttacaccgttcaaggccgccatccctaaggccaaactcgtcgagctcgagacgttgataaagatagcgaaagtagcaccacccacctacgagaattcccaaacagaccaccgttatggtgtcaatagggattggctagtgaacatgcaggatcagtggcttcggtcttacgactggtaatgatactacagcccaccatatgtacatcccaatacatgttgagactgaattattatactaggaaatcctccgaggatcgaatcaacagtttccctcagtacactatggaggttgaagatcttacaattcattttgtaggattgttttcggaaaagaaggatgctgttcctatcattttgttgcatggatggcctggtgggtctatcttggtcttaacctcacaacaggaaaatgagcaaaacagagactgacatatcattaaagggagcttcctcgagtttttgcctatactgcagaggttccgagaggaatacacgccagaaaccttgccctatcacttgattgtaccttctttgcccggttacgcattttcctctgggcccccattggatagggactttggaacaggtgacatcgctcgtgtttttgaccgactgatgaaaaacctcggctttgagagcggatacgttgcccaaggaggtgatattggaagtcaaattgccaggcgtttgggcacggagcatgaaagctgcaaaggtacggaaaagtcatggtattccttttgcggtgattgagccttctctgacaagttgtgttatagctgtacacggtaagtgcttttttcatcaaagttatttaaagactagaatacgaatatcagctagtcaacgcggttttcatgaaaaagccggacggcatgacagacgaccacctgaacgcctttgaattacagggcatcgagaatatgaagaaattcataactacgggcgtaggctatgcgattgagcacggcactcgacccagcaccatcggacaagttctggcatcgagccctcttgctctactagcgtggtgagtcgtgcaaagcgaagcgtagtcagcagaaatcgcaaacctgacacctgcaggattggagaaaagttcctggattgggtcgacgatccgcttgccctagaagacattttggaatctgtcaccttgtactggcttacggagacgttcccgcgggcgatctatacttacagacaggtgaatttccctattattttcgacttccatcagcagatatctgatgtgggtaaatagagctttcctgcgccaccggttatgatcgccaatgaccctcgttggtatatccacaagccatttggattttcttctttccctggggagcatgttcgactgccgcgctcgtggattgaaaccactggagacttggtattctgggagcagcaccagaaggtatacgatgtggcatttgaagagccgagatttgatactgacgctgtttcattatagggtggtcatttcgcggcactggagaggcctgatgaattgaaggcggacctagtcaagtttgtagatcaggtgtggccaggtattaagagagccgactaagttgagactaataagtagggcagtagagcatttgccaattgagttaaaattgtctggagtggaaagtattcaggaactgtgagtagctgatgcaatattaaccaatgagagtatatttagtcgcccgtcaacgtcgattccaatagtaacattaatttaaactacgttcgcactttgttattgatatttttgcatttcattttctatctcatatgtactccgaggcaaatcaaccttactaaagtactcgtatcacaataaacgattcttgggactagttcgaacgcatattatcaactagccaatgtttaaaccgaagcttcgggggcttcaggtgaggctaaggtatccaaccaaagccaggaaatgacggcctggatgaggcaggtaatagctgcaccgggtgagtaaattgaacgatacgttatggaaagcatgactcacctagtgccacagtcatgtaaaagaagccaactccttcgaatagcgagccagtcaatagaggcccgagcatcattccgagactatatcctacttcagtcatggaaaagactcgcaagttgcttctgttggcctcgaatagctgcgcatctttagtttccatgtccttgacaacatctattgaaagtcacatttgttagtggaggaacgaactacacaaaatgtgatcactcacaagccagttgcacggctcctacgccgcgcacaagaggtaggatactacccaaggcaatcaaactggtggtaaaaatagactttccagctgcatctcctccggcccatgggaagtgggagtctccgggcatccctagaagtaagatgagagggatcatcgcaagccagccgaagacagtaggtccccgtattccgactcgatcgcgaagccatccggatggaccgctgagaaggatattcgggacttggagacagaagaacatcatactaatgagtaaactcttccaaccgaatgcttgtcgcaggtggacagggagagtgttgttaatgccagacatgagggaggagacaacgacgacgttggccaatccggtcaaaacacgtggatcggagagcatgattctgtagtactcatgtttgaggtcatgcttgttctccactttacagtcatctggattgacggtagacggtgcctcagaaagcagtgcagtcgtctcttctgggtccacctcattgctgaccactgacacaacaggcttgctcaaagaatcaattttctttgacgattcgaggccaggctcaatcattaccaggcgtgcaatgatatccaagacgagtacgatcaagggaagtgaccaggcggcccagtagccaaataactggagcaatgcgccactcactgttggtccgccgaccattcctgccgttacaaatgacatggccatgcccatcgactgtccaaggtgttgcttgtccacattatttgccaatagagcaaatccaaccacccaagttccggcacctgccatggattgcaggatgcgaccaaggaagagaatccaaactgttcacgaaatcaatttcaaataatcatcatcaagtttaaatattctcataccggatggggcaagagcaatcataagggtccctataaaacatcctgccagggcgatcaatagtggtttcttttggctcggagtcttctcggcaaaatgcgcgacaatcggggcagaaacgagaccaatgaacccatgagtggtgagcaatgccgtagtgaacgtctgagtctgtgatggatccagatgcagtcgttcttcaagcatataactcaagatcggagtaagaaacccgtagagaaatgtctctgatggatggttagcatgactcagagtgagaaccgtgaaacaaccacacacctgcgaataaggcaaccgtgatggacgaaaccaccaaaaggcgagatgaacgccacctgtagccccatggctttgtatccttgtccattttaatatattgagagtttgacaagagaagaatgaaaaagtggggggcagagaagaaattagttaagtagttttcaggcgctatgatcacaaatagaatcccattatatcaagctagctcatggagataacactattttcgatttcgtttacgagccctgcatgtttagttcgtctttctagtgccggcaatggctttctattggtaatgcagttcagatcgtgctcgcgtctaagccgaacaccctgatcgatacctcaatgcgcctctaatgcacctcaaatgcagctacaaggaaggcaacacggaaatcacaacgagtgtgtcacacttagagttcacgccctttttgcagatccgtcttatgtactatgtactatgtacaagcatacacatcctgcaatggtatcccgaacagaacttcaagagctcacggaacatttacatttcaatcgcgattgatccacttaccccataagtgtcgagctattacgcaaatctgccaatgtatctagacgcacatagcccgtcggcaaccgtcggacctgccgcggtcttatgtaccaagtatgactaggcagatcaaagtagtatcggcaccgtagcttgcgtgttcggtcctctgatctgaaactggtaaacggctgaatcctcacggggtagaaaaacggggtctacatgcaatgcggtgaaacaatgatagttcgagggataagccgcggcgtgaggcatgcatgagacagatcttactgcaagtccaactttgagggtgtatatcatcttaaattctgatagtaatgtattgttctattcaatatatattttctctttggaatttacttggtaactccaaatgcaaccaatccggcataccatcctagtaggaactatatatagcgactataatgtagtatcggttctaggcaatcgctacaaacagtgagtcttattggtgggatactccgaaatggctaagaccactcatataaaacgccaagtatacttagtacacatccagactatcctctgtagacgcgatatcctcgacttcaaggtggatatctcaccgccccactatgtgatttttgactccaaatcctatcaacgcaacagattgagagcaacgagattgtcaaaggatctcatttcgttcatcgtgtgcatcgtcggagtggaaatagtgtgtcacgcgacttgaacttttgatatacgtaccctgtcgcggtgacattgtcggacatattcaagacgccacattccgccccctccggagtcgacagctaaactccgagacttgcaagggctaaaatcattctaaattcggactagagcaaaatgggaagcattcaacatccccagtcggcgactacagtctttctagaccagccacccagttgcctggagttctgtcccgaggccccagactatttcatcgtgggcacctatcttttatcagaaaacaaaactgaagatggaggaatcgagcagtccaaaactgggagtctacaactatggaaattagaccctgttagcaagacattgtaagctaaccgcaatcaatcatattacctagtataacgccctcataacaaacccactaacagcacttagatcccaaatccaaagaattgccctcccatacgcagtctttgacctgcatttccacccaagacacaagaacctattcgcaattgcaagcagcgtgggatcagtggctctattccaagtatccaactccaccaccggagacgcatccgcaactccaactccaagcatcaccgagatatggacgaaacaagtacacgaagacccctcaatcccagccctatttctcgcctgggcaccgcaaaacttgttcccgcagctcgcagccgatggcttcgccgtcacattctcagatagccggacagccgtcttcgggacagaggaggacatccgccaagaacagagtgtagccgaatggggcacatacgaagccaaacagatgatcgaagtctggtttgtcgcattgtccacaagcaccggaagcccaactgcgaagtccccgatcccgttcatgttcacggggaatgacttcggctcgctacacacgcgccgtttcgataataccgccgagttggatgatccggacgagcatgtctcgcccatgctgctcgagcatgatgatcgcgcccgccaccacactgctggtgtcactgctatcttgcctcttgatgttcccctggttgatgatgcgccggttcttctgacggggtgttatgatgagagtcttcgtgtgtaccatgctacgcggaggggagaggttctcgctgagcaggagcttgagggtggggtttggcgactgcagttgttggatacgacgaggattccggccgaggatgatgcgtcgaaggtatccgagtaccgctttctagtgctggcgagctgtatgcatgccgggacgaggcttgtacgggttacgtgcaagtacgaagatgggactccgaattgggagattgaagttctggcgaagtttactgaacatgagagtatgaattatgctagtggtgtgtgggagggtggacaagatactactgagatattgtgcgtctcgagcagtttctatgatcgcaggctctgtgtctggactgttgatctatagtcaaataaaaagccatgccaaattgggaaggccatctagacgctgagactataccgtcagcaggtcccggtttgtcgactattgtaatgctactggagattcgtaagccgaaattattctaacatgattgtagtcatgaacacgctagagaatgcacgatgcataagcgacaggtatacaagtacagccgcgcccgaagacaataaaagagtcattcatatccgaaaaaagtatatcgttcccattgagcgtgtaattagacaatagtctccagctcgcgagcataacccaaagcattctcaataacggtgccgctagccaccagaatatcccgctcagacctagcagtcgcctcgggctcaacagggaagtatatccgaccgtcgcggaggatccagccgcgctgcttggcaaattcgatcactgcaccctcagactcgaggaagaggaggttcttggcgttggaaatggggagggaggggtatgccttctctgagcaacctgcgatttcattgcggatagtaccgatgagaacctataaagcttatgatcagtatgcttgccgacagagacattgagctcgagctgagcacgcatgcaacttacatttgaaaacagaccaaagtcttccgacggaacacgttcggacttcgtctccctccacaccttgtcatagcttccctccatcaagttgcgctccagctcaactgggtacttgatgcacgcatcatcctcaacactgccacccttcaagcacgcctcttctaccaatccctctagcactgtgtggaagttggcactgtcacccatgctcaaaagaagaagcagatacagccccgtaatcttgctgcgctggctagtgctgaagtcgagtttcgaagagccctgcccgggcagaccggcatgtctctcaagatcgtagaatggctgcagttgctggtagtaccgtgtaaatagctgcgcgtcagtctggcggatggaggcgagtgctccgagttcgaggacttggcgggcaaggacgacaagctggggaggtgtggaggaagtcggaatcaaagcattttgcataagaagagctcgcttggaacggctgagaaggtcgttggcgacgtcgaactgtttgcgctcgatagcaccgtggagctctgacacaagggactgtagatcggacatgatggagattgtgtgggttcagggcaatactgaaaggaaataaggcagcctagccggtgtatggcaaaggcagtaattaaagcagcggaaacgatagagagtttggattttgattgatgattgttggcgacattccgatgctcatgacggagctgtggtaggcggtcagcgtgcagtcacgtgtgggcattttgatagtcgctgatgatgacttccactactaccaccacaagtcaggctatataatatttgttattggattgaaccaaaagatggcccagtatcttgacagctatatatactattcaaattgatgtctacgcatggtcatccggcaatgcgtgtcccggatggcatacggatgttttagcctagctagaacaggtatggcgcaattcaagcttaggtatccaggaaaatagcaaaaggtaaaggtagatgcatatcaactcgatataattctgagaaagtaattcgtcactcatcgcaggcccagtgagcccggcaaatcgagtgacacaacgaacgtcatagaatgcagtgacaaaccttctgatatatatatcaacagcccatcgagagactgcctgtatatgtactaattatgtactaatatctaaagcatacatcaaatttatactcagtacaaggtgatatgcttctgtttgactccctgggaattagagaccggaaattatcaggatccagctataagctgtcaatctaacctcatgaacagtctcatacttgtccgacggaacaaaaccttacgttgcaatggtttcaggctagtgctcccactgggtatgatcagccctcagggctcagagcttctcactctttgtcaatctagtaatagaaaacaatcaaaacaaaccatcccatatggcatcctcgattttaggaacttgctacctctagtcgttctccaacatccttgaagggtaacatatatatgtggtacagtacagaatgacgaagtataaagtcaagttgatggcctgaaatctactcggatcatctgatttccgacctccgtgcgatgcgggatgatcgacgtcacagtgaagcgcagtgagtatcgcgtcaatctgacttcaaaataagaaaatttatattggatactgtgggattgactttaatacagctcgacttctcggatatccgaacttattctggattttgcgcccaaggtgattcatataaatatttgaatgtggggaaatacagagtgccaatcatctatcgcaaatcagctcgccagaattcatttagcttcaatatcgtgcggggtggtatgatcagctcagatcaaatcgacgtcattgctacattcccacgtatctcacagagcctcgaccttccccagtctttcatctccgctttcaatactgaaccaacattttgcaaacgccatggctgaagcagaaacacaaccacgtcgactgtcggcggataaccaatcagtttcgaaagccgatgtttctatgaaggaacgcttcttccgctacttccagcatgagatcaccggtatgttcccgttggtattcagacgctacatcattatcaagccacacaatttcaaaagacccttgctaatgacattcttctagatttgcagcaggagatggatcggcttgcagatacgtctctcgtgggtggtgaacgtgccgatgcaacagaccactgccttgccgggatcgtacggttatccaatgaggtcaaggatgcagcgagctatatccccacttatgatcagagggtgtacgcagaggtaaacgcgactcacaatatacccaatagagcagagctgacataattacaggcaatcaaggctttgcaggatcgattgagcgaaatacgtgcaacattcgagccccgatccaagtttagcttcaagaacaagaaaaacacctctgctgtatctttgtctgatgctgccgtgctggcagttgaaggacggcttagcatccctgggtaccactctccaggtgcctcgtctattgactcatccgccaaccacacacccaactatccttccaccccactgaacgagccagacaagcagcaacaagagcgaccggagcttgcgcccacttcattcccaggtggcccggtcggggactttagcacaaattcccagtcggagaatcctccccctggtgcgtttgcggccaccggcgtatcctctgtgtcggtcgatgaccattatggccttcatattatgcttccggcctctgggtcgtcacccacagtcccggtatcaatcacctccttgaatcgctgcatcgtggatatgtccattcccaccgccaacggaaagccatacgccagtctgactgccaaagggatcaaagaaagcttattaatctgtggtcaagtcaatggccccgcacacatcaccggtgttaagaatagcgtgatcgtgatctcatgtcgccagttccgcatgcacgactgcagcgacgttgatgtctatctcagctgttctagcaaccccatcatcgaggactgttccaatattcggtttggtcggatcccgaaggcctatgtcagtgttctcctcgtcgctatatcttttgggtttaacttacattcttctatctaggccttgaggcatgaccgtcccgatcacgaagaccgttggagccaggtcgaagatttcaaatggattaagcaggagcctagtccaaactggaggctgctcgaccccaacgatgccgttcctgaagaggtctgggcagagattgttcccggcgggccgggatggtctcttgaggacatcttgcatgccattaatgtagtcccaaactagttttatccgcttggtcgttcgatgtcttacttcctgctttaatggacatgttcctgcaggacgcatcctcgatatcaattgtcatcatgcgctcacgagattgattacgccattcctacttcgaataatttcaagttctactcttttatttttgatgccaccattatcaattacgattttttgcaatgtttgaatttgtggaaggattcaaggttattgcgttacttcagcatgtacttgtagactcagctatatatctgtaactacacacagaaatatacgagattgacgaaggagcatatactgacttgagtgtaatgtacaatctctcatttagtgggagaggaatatatattttaggcgcctatgcagcctagtagtctgacagtatgaaaacgtttttcatgctaacattacgctagccttttggatgtcgtttatagcccggaggatgaagataattggcaaattacagaataagacataaaacgcctttccaggtttaaatgtgatcaataacattacttttgagaggtagactaggtcactgtttgtgatctgcaaaagttcaaggattacgcgttccaagttgtgggcactttggggtaattcttcgcgtggtagcccaggtcttcatagacggttgcatctcctaggattcaggtcagtctcaggatcaacagaaaattaacgtcgcaacataccttggagggaatcaacccgatgctcgtcttcgtctgccattttctccaattcctgaccaggctcttcctccttaggctgtttatcacccatagaagacgcagccttgccaaggtcattctgcgccgagccgatcatgaggaattgagaataaggatagtccaggaactctggctgcagaggcacccatcggagatctccgaatttctcaagtaccctaacgagaacaatgttaatatgagaatatttaaatcactccatggaagacagcttacgatggagggaattctggattctttggtaattgaccaactggtggaccaggaaacttgggactcttcgactggacgatccaacttccgcgttcttgcaggccaaagtcctcctggacatcacccaactcggccggaatggtcaggatataggcgagatgggatgcccgaggtgcggaggtgatcgcgtagacaccctccgcatagggtctggctgcctcggtatgacgttcacctcgggtggaagtctggtaggttttaccagcgatgaaattatcgtggagagcttgcatggattgtccagccttctccacaaatcccatttctcgttctctggaagaggtcggaaacttctttttcgggagtatcatcaaccgacacgaggcgtctttttcgacggagccttggccgttgtcgaattccgctccaagggcggttggacggaggacaaagaagctccgcgcgacatcgccgaaactttcaggctcgtctacatcgacgcgtgggcggaagaaaaagtagatgaagcctttttcgagaatgttggagggtactaagttttccctctcctcggacttatgaagacctccctcaattccttgcggtttctccggatggctttcgactggtttcaccgtcgatgcttgtccttcgggtggttcttctgtcttgacaggtgcttcttctgtcttgacaggtgcttcctctgtcttgacaggtgcttcctctgtcttctgcactaaacggtctaccgatgtacccggtacttcctcttttttcaattcgtctggctttatatcctccgttttctcctttttcggctgtggagcttcatcgcctgaagctctccgctttgttcccttggaagtcttgccggtcggctcggcggaagttgaaatggcctccttggccttctgagcagcgtggcgtgaggatgttcgtgtagccatgatgaatggtggattttgtggacgatggtgaagatcaaatctgatgaagcaatgggatttagcccctagggctgtaatgagatacagatgacgtcatgtcgtacgttgcaagtccgcatccgtgactttgctagaaatgaccgctcagaatgccattataatagaagtttcagtcgatatccatctcatcggccatgggccagttgttcatggggtcgttgccgttcaagtcgatcgatgctgtctccgaaccggagctttcattctcgttggcttcccggaaagcgccaaatgagtctatgtcttgagcatgccactttggaatttcgctaaacctttgccttttgggacgatgctcatgaacctcggtctgggtctcggccgacgcatgtccttgtgcgaaaaacgggtagcattgttgtgtagcgagagtgttgtgggctggctttctcttctgtcctctctttcgcgccgaaggaattgtattgctattcgatccatcgggttcgtagcccatgtcattcaggtagtctgtcaagtcgcgctgccatcgttcgaaccgatccgggaggcatagtcgatctaccctgggtaggctagtttctaactcatcatcaggctcttcgatatcgtagggcttgatgactcgaatttcgtcattgtcctcgagcggatccatgtcatgcgcaggcgttgagggtcctgagtcgtccatactctgctccctttccttgggctgatggtctgctgcagcatcagaagtaaggtcggcgaagtattcaatgggctccttaaacttgtcaggactcgtatcattcattggaaggtcttccattatctgatatcaagtcttgaacccaaacggcgttgacatggcaatccgaggtagacggtcaagttgcaaaaaccataactgagctcccaaggcaggaatgatggagtatgtgactggagaaatgtatgctattaaaaaataaagtacaatgaagagatcaggaaaatcgcacgagaatggaacgcgcaagaaagccatggtcgctataacatcatggccttccagatgcttctaacgtgggggtgataaataaccgcatatatgtccactcgacgttgaactttggatgccggttcgaaaaaagagaaaccataataggaatgcaatatactatgagaatatatcacgattccacttcgaccctgatctaaaaataatcaagtctctttggacagcgtaaagatcgagaccagctcccctgacctctcaccgcccggcagcatgattggccgatgtcattcgcttccacaatagagtccacgtttagttaactgctacactaacacaagcatcaagtgtttacctttcgctcttttctttctttcaggtggatgcggtggtcgcctctgccttatattgctctctagtgtgcggagcttgctactttacagtgcggctccggccaaatcttcaagatgcagtcctccccaaacatgctcaccaaggtacaccccctcgggcatcttaatgcgccatcgaacaatgggactcaattgaagatgctaatcattctctcaattgtttagtttgagtccaaatcctccagagctaaaggaatcgcgttccatcccaaacggtcagtcaatcccgcggagggacacctaacacctcaaagtgctcaatctgaccacaaaacagaccatggatcctcgtctcccttcactcatccacaatccaactgtgggactaccgtatgggaactcttatcgaccgattcgaagaacacgatggcccggttcgcggcgttgacttccacccaacccagcccctgtttgtatcgggaggtgacgactacaagatcaaggtctggaactaccagactcggaggtgcttgttcacattgaatggccacttggattatgtgcgaacagttttcttccaccccgagctgccctggattctgtctgcgtccgacgaccagaccatccgaatctggaactggcaaaatcggtcactcagtaagatgcattggagctacctgcaataacatcgactaacacgtctactctttttagtctgtacgatgaccggtcacaaccattatgttatgtgcgctcagttccaccccaccgaggatctcattgcctcggcctcgttggatcagtcagttcgcatttgggatatctccggcctgcggaagaagcactcggccccaacctcggtttccttcgaagaccaaatggcaagagccaacccaaaccaagccgatatgttcggaaacaccgatgcaatcgttaagtttgtgctggaaggtcatgaccgtggtgttaactgggtctcgttccaccccacactacccttgctcgtgtcagccggtgacgaccggttggttaagctctggcgcatgagtgatactaaggcatgggaagtcgatacttgccgcggccatttccagaatgcctccgctgctctgttccacccgcaccaagacctcatcctttccgtcggcgaagataagacgattcgcgcatgggatctcaacaagcgtacatccgttcagtcctttaagcgcgaccttgatcgattctgggttatcgctgcccaccccgagatgaacctgtttgccgcgggtcatgacactggtgttatggtcttcaagctcgagcgagagcgccctgcgtctgctatctaccagaaccagctgttttacatcacaaaggataagcacgtcaagtcatatgacttcagcaagaacgtcgagtcgccgccgttgctttcgctgcgcaagctgggttccccatgggtccccccacgtaccctctcttacaaccccgccgagcgtgctattttggttaccacgcccgccgataatggaacttatgaactgattcatctccccagagatggtactggggctgttgagcctacagatgttaaacgtggacaggctacttcggcagtcttcgtcgcccgcaaccgctttgccgtcttcagcccctcgacccaacaggtcgatatcaaggatcttagcaactccacaacgaagacaatcaagcccccagcgggcacgaccgacatctactttggtggtaccggatgcctgctcttcatcacccctacacatgttactcttttcgacattcaacaaaagaagcagcttgcagagcttgctgtcagcggggtgaagtatgtggtgtggtctaacgatggattgtactgcgctttgctcagtaaacacaacgtcactatcgtgaccaagacactcgagcaggttagcaccttgcacgagactattcgcatcaaaagtgctacctgggatgacgccggtgtcctgctttactccacccttaaccatgtgaagtactcccttctcaacggtgacaacggtatcatccgcactcttgaccagactgtatacctcgtgcgcgtcaagggacgcaatgtctatgctcttgaccgcaacgcccagccacgcatcttggagattgacccgactgagtatcgtttcaagcttgcccttgtgaagcgaaattacgacgaaatgcttcagattatcaagacctcgagtttggttggccagagcatcatctcttacctgcagaagaagggttacccggagattgctctacaattcgttcaagaccctcagactcgctttgaccttgcccttgaatgtggtaatctcgaggtcgccaatgaaatggcacgggaactcgaccgtcccaacttctggaccagacttggagctgaggcattggctcatggtaaccatcagatcgtcgaaatgacttaccaaaagcagcgtagcttcgacaagctctctttcctctacctctctaccggtgaccaggagaagctttctcgtatggccaagatcgccgaacaccgtggcgacttcacctctcgtttccaaaacgccatctaccgtggcgacgttgaggaccgcattcagatgttcaaggaagtggacttgtgtatgtacaaccctagtgccgattgtttctttcatactaattctcgcagaccctctcgcctatcttactgccaagtcaaatggtctggttgaagaggccgagtccattttggaggctgttggtctcaccgaagatcagattgtcctacctacactcgatcaacctctgaaggttcctcaccctattgtacccactttcaattccaattggcccgttaaggctgccggtcactcgtccttcgagaaggctcttcttggagaagttggtgttgctgatgaggaggctggcgctgttggattcgagattgaggaagaggagcaagaagctgatgtcgctcgggaaaccctcgatgatgacgaagaggcagtttccggatgggatatgggtgatgatgttattgttgaggaagaaatcgactttgtcaatgtggaaagcgccgaagctggcgccggcagttctgaggctgatttgtgggctcgtaactccccgctggctgctgatcacgtcgccgctggctcttttgacactgcgatgcagctcttgaaccgtcaagttggtgccgttcagttcgctcctctcaagcctcgcttcctcgaagtttacaaggcgaccaagacctacctcccggcgactgctggtctaccgcctttgatcaactacgtgcgccggaccatcgacgagactgactcccggaagatgcttcccatcattccccgagacctagagaccgttgccagtgttgacttgcaagagggttatgccgctatgcggtccaaccgattggaggagggcgtggcaacattcaaacgtattcttcacactgttctcgttaacaccgtgtcatccgaagccgatgtggatgaagcgaagaagatcattgccactgctcgggaatacattctcgctatgtcgatcgagctcgagcgccgtactctctctaccaactcccctgaggatctcaagcgtagccttgaattgtctgcctacttcacaattcccaagctcgaggtcgctcaccgacaactagcgttgatggctgccatgaagttggcctttgccaacaagaactacggctcagccttgagctttgccaaccggatgctggctaatggaggctccgctaaacttttggaacaggtaagaattcttaaagttcaattttccacttataatataccaatgctaattatgaaaaacaggccaagaagatcaaagctcaatgcgaacgcaatcctcaagaccagatcgacattgacttcgaccccttcgccgagttcgatatctgcgctgcgtcctttacccctatctatagcggctctcccagtgtctcagatcctttcaccggcgccaaataccatccccaatacaagggaagtgtcgaccggatatcagaggttacggagattggtgccccggccagcggcctacgcctgttcgtccccagtcagttttaattgccgcatgacgaagcataacggttttttgccttttttctcttcttgaaatgaagttacaaaatgggtacattttcatctgcacgaggagaagttgtgtttggcggcgctattcattttttttggctgggagaaagacaaaccttcctgcacacagtaccagtccccttgtctagatgtctttttgtatccaagattataattgcttagcgatctagtttgtatgcgaacatgttttgtccaaaagctctatctcctaggtattgcccaaaggtcttgtcttcgcctggtattcatgtattacccgcttagtagtgataaaagcaatccgtctttatttgccaaatatgcatatctaatgtacaagggagatctaaaccgaagagtagagagaagaccactccaacaaaaacaccataaacgtacagttcaattacaccgaccatctttccacccagttcgccacctctcttcccacaatcgacaatcaaactccttcttcccaagctttcgattgacctcattatgcgcctcgcacatccaccacccaaactccttccggctctccagtctcggctgattccgcccactcggatgcgccatccatctctggaaatcatccgcgcacacccagcaagggtacagctttgaaaagaacttcaagaacccgcccatattagcctggtgttccgtatctgccttttcggggtatgtggctgccatcgagtgcaatagtgtccatgtggagcgacctagctcttcgacgtctggcgggcagtctgagggagtttcgctcggggagggggttgcagcggcggccagagctggcgttgaggtcgtcattttgcctgtgttcgaattgggggatgaggtagcgttggagtttgcattcttgagttcggcttgcttggtcaatgctcgccatgaggcgacggaggtgcaggtgcggcagctgtaaggtgggtatattagcgccgatctcggttacggctagtcgtagatacgtacggctttccatctttgtccaggactacacccttgggcaatggcgcggctttcgggtcatcgtctccggttggcttggaggagcttgcggagttcgcgggggtttgctggttgaatatggaccctgtgcctttatattgactactgacttccggtggagccgatgccatttttcacctgtgattatttgaatccctcgacagattggtgatttggagtggtgaaagtgattcgaggttgatttctaatggattgcggagaaacaccggaggcgagaaagaggtaatagtgacggatatttggcgcaacagtcagtaaagagaacttggaataagctagcaagatccttagaatcaatgagctttgaatatgtagatccagaaactgagcccttgagcaagagtcgcaaatgacatacaagtctaatgtcatgccgatcaatctcgatccggctttgtcatccattcacacgcgctcgctcaacccagacgcgctcaagttcgcagtttgattgagataaataaatatctttcttctattactctgctctttggtccttatttcctcacatatcgtccgaggaactggacgattcatacgaactcgctcctacaccattaacctcctttcgatcgccatagagtgacataaacatgccgccgaagtatacgttgtccgactctgaagctgagggtgaggcacccagcactccctctcatcagattctcgagaagagccttcgtgaccaagtggctgcaatcttcaaggcgggaaatttggaggaattgaccgtgaagcgcgtgcgacttgctgcggaaaattcactaggtctcacagcggggtacttcaagactacaggtgactggaaagcgcggagtgaagatataatcaaggacgaggtggtgagtctttgtttgcatttgcagtgcttctttagcttgcgcagcttcagcggaaagacactgattgcgatgcttttacagggaatacaagatcaggcaatattagatccacaatcacaaacaccttctccctcgaaggccaagcctactgcccttgcgaaacgagcaaaatccgagaccgcaacaaagcccaggaagcgccagaagactaagacgccggtatccgatgaggaagatgagctaccggccccgccatccgagactcatgaggtcacaaagcccaagaatcgatcgaaggcacctataaaaaaggcacccgggaagaaggtctctgtacaaaaacacaaggacatgtcagacggttctgacttccctggtgatgagagtgatgatgtcgcaaagccgaataaacgatcgagcacgccagtgacgaagtcccctttgaagaagtcgccagcaaagaaggcctccgtaccaaaactcaccgaggatgtatcagatgttcccgacgatgctttgaatgccacaaaaatgaccaaagataccaaagatgattcggaaagcgagatgtcggtggtgcttgacgaagagccccagcctaaggccccacgcaagcgacaaagaagtgccggagaaactgcaaccaagacgaagaagaaagcgaccaaagccaccaaagccaaggaggaggatattagcccggaccaggctgaaatcaaacgactacaaggatggctcgtcaaatgcgggatccgtaagctttggggtaaagagctggcgccatatgacacccccaacgccaaaatcaagcatctcaaggggatgcttcaggatgctggaatgactggccggccatctcaagagaaggcaaaccagatccgcgaagaacgggagctgaaagcggatttagagcagatccagcaaggcgcaaaacaatggggtgccgtgagtgacgaggataatgatgaggaggcgaagcctcggcgtaggctgggtcggggacgacagtcgcttgcgttcttagagagtgagggcgaagagactgattgatggatagcatagggtccgtaatgaatgaatttgtcggactggttgagctgtgatgaaatcggatgatgcgttttatcactatgtatttcatacttcatagttcataatgtccaaaaatatagcaataggagtctccctcatcacccgactttcggtctactcatgcgctgcgcagtcaggctgaagatggcaacagaagagataaagaggacgagattgtagaactaaacttgttagcatgatcaaatcgactcgaggggtccattgacatactgcttttcgcgagtactcgttctcctccgcctcggttctagcctcgacaaagaggcgtcgcaagttagggaggttagcctgcagaagtgttagtcttggtggttggataatttgactgatgtagaataaataccatttacaccgtgatggtctggactaatggcaaaataaatgaaagagagagttgatggccatagagcgggagagtccagaagccaccatttgtggacaactttgatcgtccgaaacaccctttctctccttcgcccccattcctcctcgaaatctacccaccccggattgttcacgcacctctctgtgtttgcggacaaagtgacgaacaatctcgacagattccattccctgacctcgcgcgaccgtgaagctcccaatcccccgcagtcgccaaacgctactcgattcccaccccaatcccatatctctaggcggaggcacgacctagtcgttgctgaagcttatacatcctcgccatggcgatgaacaagatccgcggcgcctttgcggtgcctcggaaaggagagacatttgaattgcgagctggacttgtgtatgcggccccctccaccatgcgctggccaccttgccatggcgaatgatggatgatattaactattatgacagttcccagtatgcgtatgaacggtatgtatggcagtgaatcctcagtctgcccctggtagtatatgacggagacgtggtttggctgacaatgcaacaggaaggaatccattcaaaagacaatcatggccatgaccctaggaaaggatgtttcggccctgttcccggatgttctcaaaaacattgctacgtccgatcttgagcagaagaaattggtctacctctatctcatgtgggtaccaccgtacaactcaaggtggctacgtatgctgatcggtcgaatctcactttcaggaactacgccaaatcgcaccctgatctatgtattctcgccgtgaataccttcgtgcaagattcggaagaccccaacccactgattcgtgcgctagcaatccggacaatgggttgtattcgggtggagaagatggtggactacatggaagaaccgctgcgcaagaccctccgagacgagtcgccatatgttcgcaagaccgctgcgatctgtgttgccaagcttttcgatctgaacccgacaatggccatcgagaacgggttcttggagatgcttcaggagatgattggagaccccaaccccatggtcgtcgccaattcagtgaccgcacttcaggagattcagcacacagcacccgagacacatgctctacagattactggtaacactctgcggaagatgctgatggctttgaacgagtgtacggaatgggggcgcgtgactattctctcaactttggccgagtataagactaccgacgtgaaagagtcggagcacatttgtgaacgagttgctcctcagttccaacatgttaatgccggtgtggttcttgcggcagtcaaggctgtgtttttacatatgaagaacgtcaaccctgacttgtcgaagacctacctaaagaagatggctccgccattgggtatgctcccacgctgctctcattgcacttattttttactaattctgtatagttacattggtttcatcagcccccgaggtgcaatacgttgcattaagaaatatcgaccttatcttgcaaaaggagcctgacattctcaacaaagagctccgtgttttcttctgcaaatacaatgacccccaatatgtcaagttccagaaacttgagattatggtacgcatagcgaacgatcgcaatgtggaccagctccttgctgaattgaaggaatatgcccttgaagtcgatatggactttgtccgtcgagctgtgagggcaatcggccaggttgccatcaagattgagagcgccagcgagcggtgcgtcaacacgttgttggatctcattaacaccaaggtgaactacgtcgttcaggaagcgattgttgtcatcaaggacatcttccggaaataccctggctacgaaggcatcatcccgactttatgccagtgcattgatgagttggatgagcccaatgctagagcagcactcatctggattgttggagagtacgccgagaagattagcaacgcgggtgatatcttgagtggctttgtagatggtttcaacgaagaattctcttcggtttgtttttcctcctggtatatgctaccacctcgactaacctatctagacacaattgcaaatcctcacagctgtggtcaaactcttcctcaagcggcccgagaaggcacagggcctggtacagcgggtactccaggctgcgacatccgagaacgataatccagatgtccgtgaccgagcgtatatctactggcgtcttctgtccaacaccagcgatccaaacgcgacaaagaacatcgtgctctcggacaagccccctatcgtcaccacgatacattcactgccaccggcactcctcgaccaactcctttccgaactgtctactctctcttccgtctatcacaagccccccgagcagtttgtcggccacggccgatttggcgctgacgccgtcatgcgcgctgctatcgagtacgtattcaattccctgtttttgtcgaatatgtcgctaaccacttctcagggaacaaatccaaaacgcgcgcgagaacccattggccgcggctgctgccgctgccgctggcggcaccgcaggccccgcacagtcgcaaaacaacgtcgagaacttgctggacatcgatttcgacggtggtgcccctgcctccgcacaaaccgagccttctggcggcctgtccggcctggagggtctggctggtacccccgtacgtgtagcgtcccctacagctggtaccccgacagcccaaacaagcaacaacctggatgatctcttgggcgtgtttggagactctggtgctgctcaaccctcatcgagcggtgccaacagcagtgatatcatgaacggattctctggtcttgatctctctggtaatgcgggtccttcttcaaacaaccagactaagaaatccaacgacgacatcttgtcactcttctagagcaatggcagtgatggtatagccaagtgtgtttagcccacctactggttgatgttatttcgggtgttttcgcaagcgagcatctgaattgaacgagatagattgttttcttttagttgtttaattttgcttgcatctttaccggacttcaaaaggcctgtacatttctgccccgaatatcaatttctttatgagtttttggcaaagctgccctcatagaatagcatttaccgaccatcccttgtagtggagagataggccagcgagatgcaaatagcctcccgctttttctcggccgatgcaagccacaactccaccgcgtgcgaaaaataggaagaaaacctcatccctgcgctttgaccccacaaatctctgacttctatgcatgaagtatatcgtccaatgtattacagcagattctgtctatgcaggagatatgtactatgcagatgctgctatgctagcccaacttatctcccctactccacctagatagacatcacacacgttatgggccactgggccagtatgggcccctcaaattgcgaattcacacaaaacggatccatcggataagaacgcggcttaccaattagtgattataccgaggtttttccagtgtcaaacgccgagttgggatcggggttcggacctgtcccgcgtccaagcgtataaatagggcaaagctcccggaaaagtggtgcacggtgaacacttccaatccgacaacatggcggaaacagactacaaattcgagggctggatgggtctcgaccctagtgccggcgagggcaagatggtctggcaagaattcgagccaaaacaatgggaggagaccgatgttgatatcaaagtgtctcactgcggcatctgtggctctgatttgcacactcttcggagtggctgggtatgttttatgttttccgtacagacgcagcgttgtgcaatatctgtataaaaattttaaaaaaaccagcaaactaacattccacagagacccactgcctacccctgctgcgtaggccacgaaattgtcggcacggccgtgcgcgtgggtagcaaggtatccgacatccagctcggcgaccgcgtcggtgtcggtgcgcagagcgagtcctgcctcggccgtctcggcgactgcgaggagtgcgcatcaggcctggagaactactgctgcaagaaagtcgtcggcacgtacaacagcgtccactacgacggcagcaagtcgtacggcgggtatgccaggtaccaccgtgtgcctggccacttcgccatcaagatccccgatgccatctcgtcggctgatgctgcgcccatgctgtgcggcggcgccaccctctacagcccgctgaagcacaacaactgtggtcctggcaagcgcgtgggcatcattggtgttggaggactgggtcactttggcttgctgtttgccaaggctatgggggctgatcaggttgttgctatctcccggaagttggctaagaaggaggattcgctgaagatgggcgcggatctttatattgcgactgatgatgagccggactgggctacgactcatgctcggtctttggatttgattgtttcgactgtctcgtctactaagatgccgttcaacgactacctgggtctgctgaagactgctgggtcttttgtgcaggttggtcttcctgaggatggcggattgttcgctcctgttcggagcttgatgcgtcgcctcaagctgcagagttccctcgttggtagccccaacgagattcgggagatgtttgagcttgttgctgaaaagggaatccgcccgtgggtggaggtcatcccaatgaaggatgcgaataaggcgattgtggatatggatgacggaaaggcccgctacagatacgtgcttgccaacgagtaaaagcttataattagatagctagaatagacgagagatgtgcccacgaatgaagatcgaagtgttgaaagtatagccgtctagtgtatctgtaaagattggtctacgttagggccaatcaaaccacgcacgtgagcgccgttctcggaggcgctattccattttgggaactcagatttcccccgcggtggaatgaatcattccgcctcttcttctctacttcggcttcaaagattttctgtttgagtcaattgacggtcgcatcatgtctcctacactatcacaacagtatttaagtacccgcggtgctgagtacggggtgagttggaaaataacagttccaagtttcattgcaaacatgttactcaccaatctatctagagaacctttgaagatgttgttcttcaaggcctggcctcggacggtggtcttttcatccccgaggaaatccctgctcttcctcaatcatgggagaccgaatggcgcgatctgagctttgaggatttggcgctcgaaatcatgtcgctctatatctctacggacgagattccccgagaagatctcaagagcatcatctataagtcctactcgactttccgacaccccgagcgcactccttccgtcctccttgaaaagaacctctacttgctcgagctattccacggcccgacctttgccttcaaggatgttgcgctaagtttcctcggaaacctgttcgagtatttccttgttcgaaagaatgctggaaagactggcaaggacagacaccaccttaccgttgtcggtgctactagcggcgacactggttcggctgctatctatggtctccgcggcaagaaagacgtctctgtcttcattctcttccccgatggcggccgagtctctcctattcaagagaagcaaatgacaactatcttggatcctaatgtccacaccctcaccgtggcgggctccttcgaccattgccaggatatcgtcaaggcgctcttcgccgatgcggaccttaactccacccacaacatcgccgcggtcaacagcattaacatggccagaatcctggcccagatcacctacttcttctactcctacttctccctcaccaaaaccgcctcgttcaccaaggaatccaacgtgcgcgtggtcgtcccgtccggcaacttcggcgacatccttgccggctggttcgctaagcagatgggtctccccatcgagaaactggtgattgccaccaacgagaatgacattctcgatcgcttcttccgcagcgacggccactacacaaagaaggccctcgacgcgaccaccgaccacggcgtgaaggaaacctacagtccagccatggacatcctcgtcagcagtaacttcgagcgcctcctctggttcctgtcatacaaaaccgccagcggcagcgaagccgagcgccgcaagatcgcctgcgaaagtgtcagtgggtggctgaacgagctcaagaccaacggcggcttccaagtccccagcgccgtcctcgaagccgccaaggtcgatttcgagagtgagcgcgtcagcaacgacgagaccatcgctatgatccgtgatatctacaagacttccttccctaagggtcttggtcccggctccgccaagagctccaagaccggtgggtacatccttgacccccacactgctgttggtgttgctgctacgcgccgctcgttggcgcgcaaccctgaggatatccatatctctctgtccactgcccacccggctaaatttgccagcgctgtggaccttgctctgcgttccgaggatggttacaacttcacggagatcttgccccaggagttcattggtttggagcagcgtgagagtcgggttaccgctgtcggcgagagtgctggatggcagggcgtcaaggagattgtcaaggcggagcttgaacaggagttgcaggggttgcgatagatccggacttggcaagagaataacgtgttatgaaattcaccgagttggtgagattcaacgggaggagcatgtgtatgctaaaaaaatcttgtgttgtagtatagacatgttggtaacgttttcactgttttcctcccttctattaaaatatatttccagtttttttttacacctataatctgagggcttgttgaatcgatactgaaaatgactgctcagattggacaagtatctgttatcctaagtattagtactattcatgctggataatgcctgaagagatgaagctattcagagatcacctgatctgtcaatatcggcgttattcatcaagtgggatgaccggtggaacttcattggtgactttcctcgccccaccggagctgtcattaccttactcttttcctttcaccttcacttttgtcacttcacttgtgaaatcgaaaggttggcaaaattctgcacaatgccacctcctgccaatattatcccctggttcaaatgtgactatccagattgcaacgctaaatatcggcgtaaagaacacctgaatcgacatcgtaatcatcatgatacggaaatcaatctcgcctgtccttattgtgagagcgtcctaaccaggaagtgagtaatttcttcgatcccgtgggaagactcaacttagagagtaatcagtgacctgttgcgacgccatgtccggacttaccatccgcaaagagaactgcctccgtctcgaaaatttagcgcatgtactgcatgtcatgcacggaaagtccgttgtgaaggtgtattgccatgcaatgcctgtcaacatcgcggcgtcctttgtgtgtctagtggggatgaaaccgtaagcgaacaacaattttcgatcgatgatctctgccctatgccgcctgtttccacgattgatgattccgtttctgacgctccccggtggattgctcatgactatattgatatttactttaatactttccatccaagatggccgtttcttcatcgaagtacatttgacttcgccaaggaaccttgtgtacttgttcaatccgttgtcgcaatcggactttgggtgaaagggactcaggaggcacgagacgcatcgatacgtctacataatcgactatgttctgcattttacgctcaaatggtgagaagaagaagcatgataaaagtaactgcatatagaattgtgtgttgatatcatctttttgctctaggaccaatggtgcatctccaactccagtccacgccaacacataaatacatcgtggcctataacatcatttcaaagtgtgctcttgaatatcattctttctcttttcattgcaagggagaatgctagtacagatctgagcatgcaatgccgattaccagacgacaaatacgacctcttggctgcgcttgttcaaagctgtcgaaggtcggggatcttctactaccctaacatgcttctgcaacacgatgccgatgcaccactcgcgcttgtatatgtgagcgttgaagagatcaagagatttggactagccctctataaggtgtgccgattgtccactcccgcttcctttgacttgagcggagaatgttccaatagtggcacaaccaatcttttgaccctggccgacttgtccttttgcatgccagacagtgatgagctgtggaatgctccattgggcggtgagtccgaggtgttaaacaagtctgattcatccgcagtcggacgggataatggagatgcgaaaaactggatatctcaagcatctgctcttctacatgacgcacgagttggctttgattggatatagcagaaactatcttacaagatgcggcttttaagccacagatcacaggccataagggcaacaatcgaacatattccctccggttgtccactcccacttcctttgatttgagcggagaattttccaatggtggcagaaacgatcttttgaccctggccgacttgtccttttgcatgcccgacagtgatgagctgtggaacgctccattgggcggggaatccgaggtgttaaacaagtccgattcatctgcggtcggacgggataatggagatgcgaaaaactggatatctcaagcatctgctcttctacacgacgcacgagttggctttgattggatataggagaaaccgtcatagaagatgcggctatttcgccacatatcaaaatgcagcctataaatgcatcgaacatattcccttactattttcttgacaaatacctttgtaatatttttttgtcaataaacgtacattggatctgcaccttcgccaccccgaggtccacagtcaccgatccttgaccgggtgggatggccgtaaagtgatcggcctccaggtgggatggccgacccgtttccccgcaaaaccatagggtttctaagcaaagagtaacgaagtacatataaaccggctcttctttttaatatcgagtgttcctactgcaacataatccaatcctccattttctaaaaacctctttatctacaatggcttctaccgctcaatccttccgcgagatcgtcggaattccccgctcctcagcttccccgaaggactcaaccctcatcattatcgacgcccagaacgaatacgccacaggcgctctcaagaccaaaaacgttacagaaacccgcaaatccatttccaaactactgggacgttaccgtcaagccggtaacggcaaaaacatcgtgcacgtcgtccacgaggtgcccgaaggcgcacccgtcttcacgccaaacactcccttggcacaagagtttgaggaactcacccctaaagcgggcgagaaagtggttaccaagaactttcctagctcgttcgcaaagaccgatctgcatgactatctgcaaggtctaggcgatgtaggaaagaaagtcgtgttggttggctatatggcgcatgtctgtgtctctaccactgcccgagcggctgctgagcttggatatgatgtgctggtcgtgagggatgcagttggtgacagggatatccctggtgtaaaggccgaggatctggtgtctgttgtgttgagtgagctggcggatggtttcgggactgtcgtctccgaggaagatattcgtgcataggcaactgatgcaatctgaaactgcgaggactattggatcgtattcaaaatcttcggactgtatgaaattctttcctatttccgggcctctaatatacgcacattgtgccgtgttctgataacagattcttagtaggggaatgtgatcatcacgtttcgggtaaaggaaatagtgtaccggatactacgccaaggatatgccaagacacgccaagcacggacgggtttgcggggcaatcaacggcttctaagatgttcatgtcaatggatgccggtccataccttaattgtctcaattccctattgcctttcggataatttccgaagcccgttaagtcccactaccgcggaagaactgacagtcttggcaatggaaatacaacttatagatagtcgacatttgttgaacacggaggaaaaggttgagctggaacctgcagtacgcaataaccttggagctgcatgtctcagttcaaggctaaaatttgaattttttttttttttgccgacatgtggcaaggggtgtgaccctggaagcactggcgatgccgtcaaatgagagaaggaagtaagcgtgtggacccgagatccaacctcccttggcgctgttcctcgttgcttctcgagttcctttggccttggctgtgctggtttgatgcttgatcaatagaaaaatctggagttcttatgacttggtccagaaaacagagcgagggaaagaaatgttggcttccacgttggctttgatatttctgagtccggtttctcccatagtcttccccgtatgtagctcacctatgttcttttctcctctttctcttcaggtcaatcattccagatagcccaatgcattcgtattgatctcccagcttcctctccgagactgttcattttaagagtattccctcatgataggtttcaaggtagcgaacgaggaggatgacggtctaactgtatatggtagcgagtggtattggtttatgtaagagacttaatagtaatagtgatagttaattaagaggttatatctaaggaagggaacaaatgtgtggattattagtaagaatctggaacgataggatgataattggtgaagatatcattagctaccgatataagtttcggctcctttcaagtctaatgcggtcttcggaagcttactttacttaatttgaagatggaatatgatagagtcctactatatgcagttgcaactctggtaaccgatatgccgacccctaaaacccatggccacttccgaaagtcgagccgaatcccgacttatttgcctgaattgctatggatttacgggtttacgggtttgcaggttctggcgcagtctagactctgcacttatatggacgttgaaggtgggaagtcatgacatcattctccttctacgtcgttagtctattagacttgatttctttatcaaaacggctaaaatctgtaccgaggcagaggcgcaagttccactaaaagattgcaattgttgcgttctagaattttgatatcatcttttgaggacgataatctctcggtcatgccgagtgataggttccctctaccgagttccaaccttaatatacatattggaagtttggttgagcctcacaaggctggccagtgtcgtgggcttcggattctttttaccgccaattcttatttcacctgatgggtatcaagtttttcaggtgtaaaaatcaggccatgatagatagtcggaaccggcaaagcctcggagaaatcggaaatagtagatgtcaagcatacatgttccatctataaatcagtatgttccacctcaagttcgcctgtgtgcaattgttgaatcgtctctttttacagaattctgactacacctccaatatgtgtttttgcgggatgtgctcttgcaactctggttcgaaatcagtcgggtcacaatccgttgagaacctggtgtacgaaattgtcaaaccgagctttccttgcggtgagaagctcagcaatagaagatgcttccgcagagcttcaaagatccttctcatcggtgaggtgcctggttcagagttataagcaatccataacccaacgcaacaggatcctcggggtgtgggaaatcgaccgtgatcaaaaagctacggatgcggttcggtcgagacatttcttctcgcgaaaaagaggaaacccgtcttgttgtttacgaaaacatatacagtgctcttgcatgtgctattcgtgaactacaagcccagggccgtctcctggacaatgcggatgatggggtaaggcttcaatcttcaggattcatggcaatacactgacactaccaggtcattcaaacattctggagcaatcaggagttcggaatgacccaaagtcgatggaactgcgaattgctcctatcaatgcgggaattgtgtcatagagcaattgttctggccactgctcttcgattcatgaatccggagagctatctcagaatgtacgcagctgggtcatcttgcaaccaatttctcctcctggattccatcatggaccacggctaatgtatgacaggtttctttcttcctacagccacgttctccagcccgagtggaatcctaccgaaacagacgtaatacaatgctacgtcccaaccaagtcgttgagtggtgcatggatcagcaaagacctcatagcattggaggccaatactaaacatacgacgcaaaaagaattgtccaagattatgccattagttgacggtattgtgtgcgtcgcggatatctcaactctcgactaccgatatatggtagaccccgggaaagtgagtctaactgtgccactccccttcctttctaccccagttgctcaccaaatcaagtctcaattcaatgaatcgctgggccttctcgaggaagtcctaggcagccggggtccccagcggaagccgatccagctcttactgaacaaaaccgatatactgcgcaggaagctaaagcacctgggagtatccttgtattccgagggcggactcttgcaatacttccctggttcggctgaatccgttgccaagtgcttcaaggagcacttgggatattgcgacgagtattatctacgggagatttgtgctctggacgcaacatggatgaaccacattttcaaggtgtggcgcgaaatgatgttcaaatcaaagcttcttgctgcaggtgttatgtgagaatcgggaatggctattttatctgtatatacatgttgcatatccttctcatctgtctttagccaagtatcttagacttagatatcagttagacctcccacttctcatgattaatgaacaaccaactatttgagacatttatgcttgacagtaaccgaatttcaagtgatttcataagtcttgagccattaaatagccaacccaagtaagtctatgtggcaatactctctccagccacagatgtcatgacgtggtccacttttcaagtaaatcatagttaagttttatcatcttgaaacctaccttacttcttattttttttcgtaaagtctgaatctctatcgttgtccatctctacctaccatccctcgatctgcactgaatcggcatgcattttcacaacagagactcctcctttcactcgacagataccgcccagaattcgccggattcggcgtcctatcacgaaaatgataaacctccatcatcgccatctgtcgagctcgttccaggtcaaaagggtcgactagctggtgggaagtatctccaaccttccacctcccaccatgaacacttcacaacccttgatttcgactttcctttaactggcaccaaagcgatagtccaaggtggtaagcaatatatcttgattgactacacctttggagacaaagagaatccattcaattggagcccttggaagaaggcattagtctcaggcctcctttgtttgatgacccttttcatcggcctagcgactactgcctacagctctggtatcacccgaatgtgtgcagatctcggcgtctccttggagctcgggcaaatgggtctgttcaccttcaatatgacctgcgccttggcaccattgttcctagcacctttttgcgaacttgctgggcgacgcattgtctacgcgggtgcatacgtggggttctcgattatgtttattggccttgcactaggcaagaatatcgcaactattctcgtatgccgagcgctgctaggtctattcggttgtgtagggactattcttgtcggaggtacctttggcgacatgtaccaccccgaggatcgagctatccctatggcctcgttctcgtatgtcgcaattctcggtaccgttgctgctccaatctacgccggcttcatcgacgagacaattggctggcgttggattgaaggaatccaaggtctagcgaatgtccctcttatgctcatcatcgtattcttcttccctgagactcggggcagcatgatgctttctaaaagggccaagattctacgttcaaagacgggtgatcaacgctatgtcgctctgaacgacctcgaagcacctaatttgaaacgtatgctatacaactcttccgtaaaagcagttaaaatgcttattacggaacctgttgttttcttcttcggtctttggattagctttgcttggttcttgacctttctcttcttatcggtgatccctataacctatgaagaaaagaaaggctggagcgagggcgttgccggcctcccatacatcgcgctctgcatcggcacgaccctcggcttcatgatgcatttcctccaaattcacaaatacaatacagtccataaagacaagaccgatgaagaaatgcgtccggaagccagactttacggtgtcatgtttggagccgtcgcgcttccaatcggcctgtttatctactccttcacacaatacgcatatgtacattggatcgggcctatgatcgggcttggtctgattacatttggaattttcttcatcttcgagtcgtgctatagcttcacgtcggattgctacggtgaaacttcctcttcggcgatcgctggacagggattcatgaggaatacgctcggcgccgtgtcgcctctatttgcttcccagttctttcataatgtgggcagccaatatgcaggcctgattctgtcgatcatagccgctttcttgactgcgatcccttatgtgttgtttgtttatggtccggcaattcgatcccgatctaagctggcgagtgtgcctcagcgtcggcctagctccggtctttgaagactatcagtgcggtggagaaggtccgatgccggatgtcaagaatatttgagtcacattttccatagggatctatattggactattggactattgacccactccgaggagaagagaatgtaacaaaaacagaacgatctacatgtgggcagagtgtataattagtgaataacggtatagttaagtggcagtaacgtggataatttaagatttacagaatctgaaacatttagataagaatttcagatatttgcattgtgggaattcgtattactttgactgagccatgtaaagctcactatgttgaacgcaaatgtatcagaattccaagcagaatacactgtacaggctgtcaggtgttagacttgtcattcttggactccaaaatccaggcctaccttcagggcctgatgcgtagatgcagccccaaaggtggcgtatgcggttgttgcctcgtcgaatgaataatctgcaacaaacaatcagatagaatgtcttcacggtcgaggtttaggacttacgatgcgtgactagcgagttgacgtccaacttgccctctttcacttgctgcagcaaggaggggattgagatcgcattgaccagcgacatgtggatacctaggacaaattagcacagaaaggaagcatcaatgaatacttgacgaacttatgtttcggtcccataatttttccaaatgtaaatccacctttttgccatggactcccatattcgcgatgcgcccgccaacagccaccagctcttggcacaattggaaggtagctgaaatgccaaccgcctcaatgacagagtcaaacccttcatttttggtcaagtccaggagctgtttctttgcgtctggagcaccagagttaatcgtataatgcgcacccaattcccgcgctttctctagacgcgtatcgtccaggtcaaccatgacaatcatctcggggttctttaggcgcgcagtaagaagagctgcaatccccaccggacccgcaccgacaatcaccaccgatcctgctgagtggacgtctgaactgagcacaccgcattcatagcctgtcggcaaggcatccgagaggcaaaccgcatcacgtgcgtctatagaggagtccaagcggtggagcgaccgagttgcgtgcggtacgcgtacgtactccgcctgggttccatcgagatggttgccaagaatccatcctccggattcgcagtgggcgggaatacctcgctgacagtaacggcacgacccacatgatgtcatgcaggagataaccactcggtcacctacttgcaatccttgcacggtggagcccaaggcctcaacaaccccaacgccttcgtgacccaagacaacgccagattctgcggtttggatgtcgcctttgatgatgtgcagatctgttccgcaaatggacgtatgcagcattcgcacaactgcgtcggtgggctcctgaatggttggcttgggtcgttctacgacttcaatcttgccattgttgcaaacaagacccttcatggtttcttggattaaagtgtaagaggtgtgggaaaattgtcggtgcgagttgaaggaaggaaaagaagtcgacggcgtgataggagaaatggaagggttgggtctttgggaatttatataccagctctggaggggtggagaacgtggtaatcgtcgaggatagaaagatatggcccttattgacgtcaggcagcctggcttggtggacctagaaaactaaaacaaggcattagtcgtgatagatatgcttatgcattgtgtgtgggactcgtacattgttcatgatgtggatgttggaaacagatcgcggtttcgggggcacctcggaaatatatcagccagatcagctgattgtagagagtttcgagtaatttcaatagcttcgggcggaggaaggtgattggttcagccgtaagaactagttaactagccggactcctgctcgtacgttattgagttatcctcgtacgtttgccgttagacggataaggaatgtcttggccggcctaacatatccgagaatatgcatctttgactttcgcatgattcaagcactgagtcatgacggagaacaataatactttctttgtgtattatcaattttgaatccatttggccggaaccggaagaaggtggcttcattggaatagttggcctctacagtatcaaatgagttatacagttgccgttaaactatatattgcgagtgacaatatcacaagttccaatcagccgtaaaataataccgcatatcatgatcataagacatactataagagaggcattaaagagtagcatcatgatatttgctaacctttccgttctcatcttccatctatacgcttgaaccaaattttcatgtcattcatagtgaactggacaaaagcgtcaagtgaataacagaatatcagtgcagctagagagaacgcctttgaaaattctataatcaacgaattcgaaaattcctacgattagggctaatgtgtggagtttcctcggaaatttcttaaaacaagataaatcgacttttcattcaatgcatatgcttctcaaacgaaatataatcttcaaaacatacaaagagcgaaataatccaagcaatagacactatattactattagtatacttaaaataagaccgataaagttcacaaaaatctcgaaatgaccaagcaaccgttcttccttaatccttcggccctgttaaaagcaaaaggagaaattccaagcggggcataggccaggcatccaaaaaaaaaaaaaataccgaaggtaccatgaggtctctgatccacaccacgaggaccagagaggtcaggaaccggaagggatccggatctcaataaagagatggatcgaccgtcgaggcttctcaactgatttacaggagagccatgagggcaacaacaccagcaaggaagccagcaacgggcttgacgctggaggcagcaccggtgaactcgccagcggagggagaggcgccgtgctgctcaggggtagagggcgcctccggggcggagggagtaggagagccggagggctgggcagcgggctgggacttgacagggacggcgggctgagtctcgccgggaacagcgggaacagcgggctgggtctgtccaggaacagcggggacagcgggctgggtctcgccgggaacagcagggacagcgggctgggtctcgccagggacaacggggacagcgggctgagtctcaccaggaacaacggggacagcaggctgggtctcgccggggacaacggggacagcgggctgagtctcaccgggaacaacgggggtagcgggctgggtctcgccgggaacagcagggacagcgggctgagtctcgccaggaacaacggggacagcaggctgggtctcgccggggacaacggggacagcgggctgagtctcaccgggaacaacgggggtagcgggctgggtctcgccgggaacagcagggacagcgggctgagtctcgccaggaacaacggggacagcaggctgggtctcgccggggacaacggggacagcgggctgagtctcaccgggaacaacgggggtagcgggctgggtctcgccgggaacagcagggacagcgggctgagtctcgccaggaacaacggggacagcaggctgggtctcgccggggacaacggggacagcgggctgagtctcaccgggaacaacgggggtagcgggctgggtctcgccgggaacagcagggacagcgggctgagtctcgccaggaacaacggggacagcaggctgggtctcgccggggacaacggggacagcgggctgagtctcaccgggaacaacgggggtagcgggctgggtctcgccgggaacagcagggacagcgggctgagtctcgccaggaacaacggggacagcaggctgggtctcgccggggacaacggggacagcgggctgagtctcaccgggaacaacgggggtagcgggctgggtctcgccgggaacagcagggacagcgggctgagtctcgccaggaacaacggggacagcaggctgggtctcgccggggacaacggggacagcgggctgagtctcaccgggaacaacgggggtagcgggctggggggacaatgggggtagcgggctgggtctcgccagggacaacagggacaacagggactgcgggctgggtctcgccggggacagcgggatgagtctcgccaggaacaacgggaacagcggggtgagtctctccagggacaacgggaaccacggtggtcggcacaacgggagcggtggggcctgcggtggggcctgcagtggcaggcacagtggagttgtagaaggtcaaaggcttctcatcgcacaaggtgcacacggtggtcttggtgatggtgatggtgcttgttccggtgacgggcacagtccaggtcttagagccagaggtgatggtagacgaggaagctggagatattgttaggatgtgtggttcaagtggtacgaatctggtagaggttataggacttactagggcaggtggtggtcacataagtgagggtcttggtggtgccaggcttcacagggaagtgaggcttggtggtctgctcgggcacagtagtggttccgttggcccaggtggtggtgctgtgctcgggcaccggggtggtcgaggtggtgcacggggtggtggtattgctgtacaccgggacggtggtgctatacaccggggtagtggtgttgtgcacagggatggtggtgctatgctcgggcaccggggtggtcgaggtagtgcacggggtagtggtgttgctgtgcaccgggatagtggtgctatacaccggggtggtggtgttatgcaccgggatggtggtactatgctcgggcaccggggtggtcgaggtagtgcacggggtggtggtgttgctgctgtgcaccgggatggtagtgctatgctcaggcaccggggtggtggtgctatgctcaggcactggggtggtcgaggtggtgcacggggtagtggtgctgtgcaccggggtagaggtggagtgactgtgcaccggggtggtggtggtagagtgcacccgggtggtggtgctatgctctggcaccgggctggtcgaggtggtgcacgggctggtccacgactcagacgactcagtggacttgctccaggactcgtaggtcgaagactgctcggccggcttggaccagctctcgccccagccctcagcctgggcaggggtagcaacagcagcagagctctgagcggcgggacggatgaagtcctcgccacgagcctgcatgataccggcaaaggccgggctggcaagagccagaagagcaacggaattgatcatttcgagagaacaaagtcttaacaaacaaacttggaaagataacgagtgaagagatgatgaagaaaatttcaatgatggacacagatgaacgatcttatatgccctgtttgagaagactggttccaagtcatgacggatatggtgtgccacggtcgtgtccaggtcagaaaggtagacctgaatcacaatgtcaccatatgaggccgaatgcaggtactaggacagctcaactccagatggcaaaggcacagatggaaggccattggacaaaatctcgcgcaatgatacattcatatggcaaactcagatgcaaacgtgacagactgtagtttcattggggtaagtggtgcaggaggtctccatcttcatccactagagtaacctaatgcggaagcatggaaagagcttggcaatctccatacgtctccacaaactgcgagagtagtgagcaaatccccggggggacagcatattgcttcattgcgatagagaaaatcgtttgataacggttcaagacacatgtgttttggattatgtggccagcaaaatgctcattctggatctccagggttagcagggcggtagccatgactcacctccggacagggggatagtagatcatattcaaacggaaccacaattgatatgacaaggttcctccgattggggctacagaccccacggagacgaatagcctcgtgggctaagctattggaccagaagcaggcaaaaccgcaagtacgaataggcgtgattccatccaagattggagctctggaatgtgggaatagcctccgattgagtatagggccgttccattggtaggtgccaccttgaaagaatgtacacgcgagctcgacgtatttccggagcacaacgatcctataggctcgcaagacatcttttctttgagttattaatcggatgtggcccatcgtagcatcggcggctgcaatcaatgacggggacatctcaatctagtatgttgtactgggttaggccaagcctccactgcgcgaagatggggctttcgccgcattaacattgtggctctcatcagagattgatatcggaaaagtcttcaaccaatccgagaatgtgatctgtgcagcctgcacggttgttattccatttttttttggaacagcagggaagtctagatgtcatccacggatcctggtgaatgagaggtacagcagtgaggtactacgcagatttggccgcaagcggtaagtggatgagcatagtacctcgatatcctgactgccctccatagtaaaagcaaggaacaacccgctttcggtcatatatgatatttccattttaggatagcacgtgacgtagggcttagggcagacgcgtgcacggggcatcgcgcgtcgcgcgtcgcgccttcctgtttgggtccaattaagccccggagaatcttgaaaagagcatctgctttgcccattcgcccacaatgcctcactcagtatcatccggctctgcgcagaatgatgatgagatgccggatgcccctccagtcgagacctcaactgagactcgcgtcagactcgaggatatgttcgacggcgatgatgatggtgatgacgatgaggagttcccggcttccgcagatgtgaagatggattctccgccaaaggaagagtgagtgctaagctcttgtacagtaatattggactcgactgctgacagaggctcgcaacaggcctccagcaccaacaccatcgggtgtggacccagatatcatgctcgccttttatcaacgacttttccccttccgatacctctttcaatggctgaatcatggaattgtacccacaaaagacttcggcaaccgcgaatttgcattgacactgcaaaatgacgcctatctccggtaccaatcatatccaactgctgacctgtaagacccatttcaactttgattgtccgatcccgtttgagctaacacgtatgcccaggttccggaaagacatacttaaaatgaacccttctcgtttcgaaatcggacctgtctatagcaccaacccacgcgatcggaaaacgctacgaggcggtcagatgaagccagtctcgaaggaattggtttttgatattgatttgactgattacgatgatattcgtacatgttgtgtcaaggcgaatatttgtgctaagtgctggtcatttgtgacaatgtcaatcaaggtcatcgacaccgcactacgggaggactttgggtttgaacacatcctctgggtttactctggtcgtcgtggtgctcacgcctgggtatgcgatccccgtgcgcgcaacctcacagatgaccgacgccgagccattgctggttatcttgaaataatccgcggggggtcacaaagcgggaaaaaggtcaacatcaaacggccactacacccccatattgtacgcagtcttgagttgctcaaacacgactttgcccggaccacactcggtgatcaagatacattcgaatctgccgagcaggcagaacgccttctgtccttgttgcctgacaagaccttaaacgactccttacggaggaaatgggaatcctctccagatcgtgccagcaccagcaaatgggccgatatcgattcacttgcaaagaccggtaagagcagcacgttaaacccggcgacgctcagggatgcgaagcaagatattgtcttggaatatacctacccacgcctggatgccgaggtcagcaaaaagatgattcatttgctcaagagtccctttgttattcaccccggcactggccgtatttgtgttcccatcgatcctcgcaatgcagaaaacttcgatcctctttccgtcccgacggtgatgaacctacttgctgagattgatgaatatgacgcgaaacactctgtcggcacagcggaggcagatatccccgacgctgaaggcagtgcgatgaatggctccgacattaagggtagccgtaaggtgcaggattatgaaaagaccagcctgaaaccttatatcgatttcttccgttccttcatcgcaggcctcatcaaggaagagcgtgctggtaagcgtgaacgagatgatagtggccctgttgttaaggctgatcctatggaattctaaccgcatcgtgttcatgtttgttccatttgcctagcgttgccataggattatgactttatgttttgttaattacctccaccgaattttactttggacttatatcaagggatcgcgcttgggagttggcatttattgtgcatggaaccgagttatttgttatcaatcagccttattctacctttattatattctcattcgaaactatcaattgaatagagatagggtgtgtcgatgaagcagttcatgaattagtttacgatgaagcaagatatgatatgaatgacactttttgctaggggttttcaaattgtagtatctacaattatgaaggcgctactgaacattcagcaggtcagatccatgggatggctgtatcaataccctggagataatcgctcagctgtggaacttatcaacttggaagatgttgaaattaagttagagtcaggagtacgagtatagcaatgtaataagtgaagtgattgtatattggaaatattggtacaaatagagtcgtacaagtaattgcactaaagctagccatgatatgttggcacacgggtggtatctccatatcaggcagacttctcattatcaaaaggcgtctctgacaggattaaaaagaaatgggccaaaggttgaatgtggtagtaaatttaagcaccaatgaagttcttgacggctaaagaaaggtattgttagcacgaatcacggaaattttatataggaagggaaacatactctccaaccagcgcaagtactccttctgctccttgacggagatgtagtcaggaaccatattagcgaactcggcgttaaggccacggtcctcgaggtagcggtcccagagaccctgaaggtcctcatcgaggttctcgaagggaggaccggcgtagaggctctggcgagcccagtccttctcagcagtctgggactgagcgagctcggcgttggcgaagtgggagacctcctcgatctggaacacgccgtcctggacaacggtctggatgagaagggcaccattgttgggtttctcgacggtgatggtaacacgggcagggaagctaggctcgggctgctcgatgtcctcggcggaggcctcggcatcctggccgcgggactggttctggaagtccatctcgtcggacaaagaggcgtcatcaaagtcctcctgttcgctgatgttctggatatcggcgacggtaaagctaacacggatgctaaacaatcatatgtattagcattcattgaagggaagaaagagtcgcgaggaattgtatgaatcgtacttctcagtgccgaacttcttggtcaggataacctcctgctcgccggcaacatccttcacctgccactcgccatccttaatagtctcctcgatggattctaattgctcctcgaattcgggaatctcggaagacttctcgtgtctcagctcatcctcgagcttggcgagaagctcgatgtcgactgtaaaaaagtaaaatccaatatcagcgtgaggccacatacgaagtccgccaccagacaagctcggatttcggcggactcttcagatatcatcaacgcatcttaccttcagacgaaggagccttgaagatgctggaggtcgagaaggcagcgtaggcgggcttagtggcctgattccatgattgccggagagcgggcttagggaatgctgggcgcagagccgaagtggcaatggagcgcgagaaagtgcgcgggatagagcgggtgacggtgcgaagagaaagcattgtgaatgtggatgggtctaaagttgatgaagatgaaagagcttgggaaaaagtaaatggagctaaagttattacgagtgccaagacccgcgcttctgttttggccgactttgcgcggccacgcaatttcattcgacgttaggcaaaaaggatatataatgttattggccttgattgaagagaacattgagtaatttggattgagtggaattcatatcgcgattcgctgcactctacgggatgaaagaccttgcgcatggaagaaacataaaattgattccgtaagtccatttttgtatgacactaggctcgctgacccttagtcctcattacaaaatacatccaccatctccccggcttctcgaggtccactgcgtcattgtgctcataagtggcgcaggtgaatactttaagtcggtcccccgggcatggagaaagtggatataggagtagatttatttaccccaacactctgcgcgttccaccctcgcacccaatatgtcaatacaccattcgaggaagatacagtgtgtgtgtgattcatttacgctgtcctctcgtcgaaacgatgtgcagcctaccactactatatgtatgtttctatgtatcgtgtaccacttcctaagcgaacttagagcctcgccgaggcctgctgtggcctatgccgttgttatgtttgcgctgcccttatggcgcgcgactttgaaaccgttaacagtaccctcgcagcttcgatcgcctcggcctacccggcgtttagaccgttttctggtctctatccccttaagcttatccgttattcgtcgattggctcgacagagacgggttcccgatcgcttccggccgtaggagtagactcagataaacgagggataactgataaatgtacgagaccattttattagaccattttattcgatattacgagatttgcccggggcgatacgaaccatcgtttctgagtaaagagaaatagtagcttatcttatttcaattctaggatgtataaacattgaacccgtctatttttgcggggtagggccgcttgataccgcgacgatcgtttatataatcctacgactataagagcacctacttcaactctacttttcagcaagtccaattctagagtcccgaggcataatttaggctacaaactgacagatggcgataataagccctcctcgttcaaatagctcttcttcaaaagaaaatcaatgcgtcaaaaacaagttcgtcgcaaatccaatttgatgaaaaaggcgcacgaatatagtaagttatgtgaagcagacgtctgtgtgcggattcgccttgggaaacaatatagactaaggatgtcgcataaagtctagcggtcactccgcaagggaagtggtcactttatatcgaaaatacagcgacttcgcaatactatcgagtatctacggccacaataaaagcgaacagtataatttatctcaagttcagtagttcattgatctaagatgcaccagcattttcttcctcaagatagcttcgtccttctgagcgtccttctcagcgtcttttgatcgttctcctaaacgtcgggtccttgaaacgtccttttaagcgtcttctctcacccctcttctctcctcacctcttccctccttaagtttctttctcctcggggcccttatcttcaccgctaaacaccaaaactgattgccaggttctattctggttgaccgcattcgtggtctctgggtctgcgtccgagcatcgcgaagacgcagcgcccgatcggttccagggcgcaggttatatcctccagctcggctgcagggagggtaaggagctcatttctaaaccactgggagttgacggtgcgctggataaagccaagggtctggagccgccgcctgaactccattactatagtccagtgcactgccgatctcgtgtgtggttgaactgccagcccagttcctcaaagtctgcccgtgatcaatctgcgagctctggggtccccttccacacctagtcccagaggcagtctacgtatcaggcgaggtcggcggttgagatctcaaagtgggtgccagacgggtccctccccgaaggcccttcaggaactcgtaggtcttggcgccattcttctcctggtggcactcgttccgaaaatcacagccctagagggcaccgcataccgatctcatccccttcacctccgggatgtatcctccgccgtgacttcgcactccagggcatcagtgttccactattgtcgcccagaagtaaatagtactcttgattgtccatcacggagtacctgaaagcgtacccactacaccacctggggccaacgagagccgccaaaatcacgcccatcgtgttcaccgggggccttgtctaatataataattaagtcattccggaaaataattcctatgagaaacgatgtcattttgatgttgtcgagagcttcaagctgaggcagcttattttctagaggaggtggtggcaaaccttcaagtatgctatgacgatttaactgaatgtctcaacgtacgaaatgtatacatcatgatggtgggggcctttacaatatgtacttttagtggactgcagcaaagaccaaagggttcgtttctctcctttccccatttatcagagccagttgtcaaccaaagttaccaaaagatgactatcccagatgaagtcgatatcattgtcgtcggcggtggcagtgctggttgtgtttccgctggccgtctcgccaatctcgatcataatctccaggttctgctgatcgaggcgggcgaagataacctgaacaacccacagtacgtaaatatcactggtgtattgactacatgctaatgcttaacagagtttttcgacctggtatctacccacagaatataaagcttgattctaagacagccaccttctaccattctcaaccatcgaaagctatagatggacggagagccattgtgccagctgcgcgggtccttggtggagggagttcaatcaactttatggtaatctgcacatgtcatttcttgtattgaggttcatctaagtgaatagctaggtgtatacaagagcctcggcctcggattatgacgactttgaagccaagggatggacaacgaaagagcttctgcctctcatgaagaagcctgaaacctaccagagacacagcacaaagcgagacgtccacggctttgacggtccaatcaaggcctcctttggaaactatacatatccaatcatgcaagagtttctccgtgcggctgaatctcaagacattccagtcactgatgacctgcaggacctacaagctgggtaagaactcgacatcctaagtagtaattgcattagtacgtttcggttatatattgacttgctgtggacctctagccacggtgccgagcaatggactaaatggatcaaccgtgatacaggtactgcagtctatctcttatctgatcttgcaacgtatcatactgattactttgtggattaggccgccgcagtgatgccgctcatgcgtatgttcacagcactcgagaagattacgaaaatctttacttgaagtgtaatacgaaggtggttagggttattattgaaaatggaacagcagtcggtattgtaaccgtcccagagaagcctctgaaagatgaaaaaatacaaaagatttacagagcgcgcaagcagattcttatctgcggtggtaccctcagctcacctctcatactccaacgatctggaattggtgaccctaaaaaacttcgtcaagcgggtgcgtccaacttctctcatccccagaaaccttgagatctgtcattctaagaagcttcatacaggcatcgaacctattgtggacctgccaggtgttggttgcaaatttcaagatcatcaccttctgttttctgcatacagagcgagacccgacactgagacattcgatgaattcgttcgcggaaataccgatgtccaaaatgcagctattaatgaatggatctctaaaggcactggtccgttgtcaacaaatgggattgaagcaggtgtgaagatccggccaactgaacaggaacttgaggagatgaagaattggcctacatctgattttctgagtggttgggagagttatttcaagaataaaccagataaaccggtcatgcactactccgtcattgctgggtaagaattcaaaccctctgtgagcttctctccagtttctaataaaaggtcacagctggttcggcgaccatttgcttatgcctcctgggaaattttttacgatgttccatttcttggtaactacaatgaagcacttgatcctatctagctcctaacaagaaatgcaggaatatcctttctcccgtggatggatccatgtgaaatccccggacccctatgaggctccggactttgatgcaggatttttgaatgatgaccgtgatatcgctcccttggtttggggctatatcaagtctcgtgagacagctcgccgtatggatgcatatgctggtgaagtgacctggatgcatcccagttttgcctcggactcgcctgctcgagcacatgatctggaccttgcaacaactaaagaatatggtggtcctgctcatatcacagctggtatccaacatggtaaggaaaccgcagtgattgctgtcgtccatcctttactaaaccatggttataggttcctggaccatacccgtcgatcctggaatgcagctaccagagagcgtgatcagctccagccggcaggcaattcgggagcccatcaaatacagccgggaggacattgagtgtattgagctctggggtgagtatacctacttccccatcttccttcatattctaagcacaattcccagcgagacgtcatgtagaaacaacatggcactcccttggtacgtgcagtatggctcctaaggaaggcaacttcaaagtcaagcatggaggagttgtcgatgagcggctgaatgtccatggtgtcaaaaacttaaagatctgtgatttgtcaatctgccccgataatgtgggtactaatccttacagcgtaagtcttccttgtcgctgtgttctatctcatttccttcagcgaaatctggtattaatgaatgttttttaaggttgctctcttaattggcgaaaaatgctctgtcctgaccgcggaggatcttggatattcgggctctgatcttgaaatgaaggtgcccacctacaatgccccaggtgaaactgttcatctccaccgagtttaacatgaggacaacggtccaaagagcgtattagatagttttgggattctagaatttcacttttcttgagactgtattatcttagtcttgagaacgggacttgggcgaggtcgtgtctttatgtccggatgatgtgagtagaggttacattacggtgtattggggcgccaacccgaaaacagcaaagctaaccagatgtagtaattcacaggtccctatattactctaagatagattctattcagtgtcagccatctcgaccttttactatatggtgtaacggaacacctgattggaccacttttaaaagaccaacctatctatctgtaccgtcttctagatcctagcccgatccagcggtaatcccttcttctccgccttatcctgaaccagcgcagctaaaggatcaagaccaagcttgtaagatttagccggtcatctaaaacctatagctgacgtatgagacgattatagcaattcttaaggatagtccgtcttcctggcccggcacagaaataataaagttgcgctagtcaatatctaccttgtgaagtagcagttttcgtctgttaagctactattagaaaccaggagtcaattctcttatcctagctttctggatctactgaggtactactattaggaggattaggcatttttagtctgggagtcagtagagcttttagtatgtcatatcctcgtatcgagatatatcatcactaagggtaaggttgccgcaactattcggccggtaagtgctagtcttagcagccgatataagaaagtggtgcttataccgtaaccttataggtcctcgaaggaattcaatatctacgcggtcgcgggagagccctcgccgccttgagtaccaataccatattgctcacggagtccggtggagtcaggatcggtaagtagggaacctaagcgcacctggtgggccagataagtatagtttactcacggtgattaatgttatagtagaagtggagcacaggctacagctaccaaatcgatacagccgagatagacgcgctaactctgaagctattcgctttagctaaggttataaaaaggctgattataaagaatcctccacactaactatcacactcttataacttggttcgcgaaccttaactcgaaacacgcccgtccatatttggaattgtattcgatccatgatttccaagaatagactttgtattttacatgacgcggatgggattctgccagatgtattttactcgagaatgccatacaatcgcagaattgtatagtaacggctgtatgtagatggacgatacaacagcattgaattgaaatggtatattcgagaatattcggctgtacagaatctagaagaatcaatgtacccataatgcgccaacccagtctttttggacaccagacaaaaaaatatagaaaaaaggaatcgtgagatcatgacatgctcttcggtgggaaagtagacgcaagtttgtttccgtcttttgtgaaccgcatgaacttaatcgcgctgagacccgaccagtgtccattccagttcttcattgcggtcattgcatattgatcgcctatatcaggcatccacagtccggtctcgaactctcgcgcctcggtttgcacccgctgtttcaaggcctcttcgcgcttgctaggaggacgtcccttccggcgctctgactcgagctgtttgatttcctcggtatcacggtcaatgtacctggtttggattagtcttgggtttggtaatggaccatcggtggtgcgtacttggtgacaaactcggaaatctcttcggtcgaaagggcctcagtaagttcttggatagcctcatggatgtaatcaattcggtccactaatcgagtcagccgggtggccttcaattgaaatgggcagttgtctcacagtatggctgtcttgcacggttcacagtggcgttatggcgggacaatcgatcatcgcgagcgccagctttgcgaagtcggtgggcatcccgactgttctcatgaagcacattagtagaggtgcgcttcttagaaatctgcttgtgcacctttgtcaaggtaacaggcatggttgcgggctgatgacaagaattactccaaacactccgccgtggatttcgacgataattttcgtggatgcaacggcataattaagcggtgaaccccaaaatcaccgccttccccactcgaggaaagcgcgtctgcgcgtcgagataggcattccaggagttatctactccttcaatcctttaaccgggatttgttttggacctgctattgcattcaacattcattagtcttctgccggtgaaaatctcaacctatgttaccacttattgcttgaatacgaggacccgcctgtccctcgaacggtgtccacaatgggcatcaaaggtatgttaactttgtgactgtctaggggagatgaatggcgattctaacacagacaaataggactgcacgggcttctcaagtccattcagaaaccatgtcacatcaagaatttcaatgggcaaacgcttggagtcgatgcatatggatggctgcatcgagggactgttgcttgttcagtggatttggtcctggacaatccgacgagaaagtatgtctttcgatatcttatcccatgaactgttgactgacaattccatcttatgacagacacattgatttcgtcctcaaccgagtccgcatgcttcttttttttggagtgaaaccctacctcgtttttgatggcgacaatctgcccagcaaggcaggcactgaacaggatcgctacagacggcgccaggaaagcaaatgccttggactggaactacaacgaaaaggaagaatggcggaagcttaccaagagttccaaaaggccgtcgacgtgacaccctatatggctcgccagttaattgaggaactgaagcaaatgaatgtgcagtatgtggtggccccgtacgaggcagatgcccagttggtgtacttggagcaacagggtgacattcatggaatcatatccgaggactcggatttgcttgtttttggagccaagcgattaatttccaaattggatcaacacggcgaatgcattgagatcaaccgcgccgattttactgcgtgtcgcgaagtcagtttggttggcttcagtgatccagacttcagaaacatgtgcattttgagcggttgcgattacttgacaaatatccctaagctggggctgaagactgcctaccggattattcgcaagcatcggagcgttgagaaagccctgcgcatgctccagtttgagggtaatttccgggtcccagccgactatcttgccaacttcaaacaagccgagttgaccttcctttaccaacgggtcttctgccgcaaagctgaaaagctagtgactttgacaccacctgataaggataccaatttggctgcgcttccatatatcggcgccgatatggagccggaaattgccatcggagtttctcgtggcgatttggatccaactaccaaggaaccaattaccctgaagccactggccgcaggtagatggtcccttggtattaatcgccgccagacattgggtacttcctctgagttgaagccaaagaagtccatcaattcgttcttcactcccaagaggacaccgctggccgagctggaccctaacagcctaactccgtctccaagccagcagcgactcctagagcgaaatgcgagcaacagctggcaggccaatgcagcgcccttccgctccaactcggtcaggtccacgcctctcagggcgttttctgaccaaggtctcagccctatggttcggagtgtggaacgctcctcttttctggcccaaagtgcaagatcgtcggccttgcagtgcacaaagaggcagaggctgtgctctgaggccgagggggattctctgcctgcttgtccccctgctcgcagtcggttctttgctcaagccagccctagtcctcaagatctctcccggtctaaacggtcacgcaaatcagtgatcggtgtcttttctgatgaaattgcagaagacataatgtgcagcattcctgatcccagtactacccctgggcctgccgagtctacaactgagagaaaccttgagatatccgacaagcccagtgaagttgataccccttctaaacctacctccgacaaagtccttgtgacagagaacctcgatgtatctcagaatagtcctagggataacacaccgaactccccaggttttagtctggctcttgactatcacgttgaccggcaaaactcgaatttactctccaagtttacttttcaagctgggcaaaagcccgaaacaaccgcagctagctcgaccatgactaagattcctgcggttcagacttcccatagaccttcaacgccctcgacccccagaagcccagctgcgattgcacggagcaacgtcttccatcgacgcctgacgccgctccagcggatgggacagtccgctctcagtcgatctcacagcatcaatattcctactaaactccgggatgccgaagctgttgaacctcggactgaagcttcatctcctatcgtgcataaggtgtcctctctcgcaggaatccaaggcagcgaagatctcattgtcccagacagtgaggatgaagaggacgaggatgagcccagcacagggtactcaaccactcttgatctgaaacgctttgcttttgccgcgaattaggctgcatctctatctgattacggagcatagaacaggaacatcggattttggtatccggggtagcattggaccactgatttggtaggttccactttggcgcgtaacttgtgttaatacggagtactttggttgggtttattgtttgacatagcgttggttagagcatactcgaaaacctgaaacattgaaacgtgcccgatcgctagcttgtaggtactccgtgcatcgaagtgcatcatgtagacggcccaatattgaagaggctgggtgaatcgcgtggcttgtggatgtggggcgaaggttatcgagatctgcactagtccagatcgggactagagcggccctggctttcccgtgtccggcggcagaaatacccacacggaaggcggtctacgctggttaccggggaagcgggcgagtaaacaagggcgttggcccagcctcccatattttcctatacaactttgcctcatccccagcctccagagagattcagagaatcggtcaattagcctgacgttgagttttgtgccatttacgatcccttctttccatcccttccattctttctacacattctatctctcccatatacttcccacctgtactacacacaggcgtcaagtcatatcataatatctgacccatctggataatccactctaggtgcaaaccggattccacaataatatctaacatcctggatattgttctaagtattctcggcattggatacgtcaacgatctttatcctactctccgcattcttcatctacattccattccaacgatctcgatctcgattcaacgctcatcgcaaacacacgaaccaacaacaagtgtgccactggtgtacaattcagttcggtgatcgcattcaattcaggcaactccttctcggagacccgagaagcgagtcaacaacaaattgaaggagtctgaccccgacgtggtcttaattgcacacaatggctgctggctttgctcaaagatgggcccgtaagtgacgacatgtcgaaagagagcaaacaatggcattgttactaattctccatacagggttcattccaatgatcgggtaccaccacgtgttgatgattattatcgcagttgctattatcatattatgtgagtgcttgtccattgcgccctctactggaaagctgctaatataatgcagcacttctgttggccggctgctcttcatcatctccacagatgcccaccatcttccttatctccctatactacgaaaagtataaccctattagagatctctcacaagtcgacccaggggttgtcactgccctctccaatattgtcggcggtgcagagttggaagtccgagtgggatactttggtatctgtattcagcctgataagggttctttcatctgcaatgccaatgcgacggcgctggctgagattgtcacggtggatcaagatccactaaatctgatctgggttgcttcaacgttcaaagatgccgttgtgtttccgtatctcctgtgagtaactgtaattccttaacgtcagacaaaactaattctcgtgcagaattgttgctgtcattctcgcattcttttgtttcatccttctggcgacattccctggctggcacgaggaggttgacgaaactggatccgagcgcgaagtcaagcctttcccctctcgccccgtctcccaggctgcgctagccctcattttcgtttcctcggtattcgttcttgtgtccgtattatggcagcacacggcatctgtcgctgccagtacgatagcccaagacatgggtaatggaagtgtgaaaagcggcgtcggctcttctgcaatggtgcttggctggtttggctttgtcctactggtgatagtcactgttggtttgctggtcatgatcttaagtataagtctgattcgcaaactgaccgatgaggaataatcaaaccatcctcaacgccgacgcaaaaaacacttgcgctctttgcttttctttttttttcgcgacttgcttacacctacttcttctttgcctacgacataccctacccttataacgggacgacacaaatggaaatgaataatacctacgagcacacgacactggctcgcaattcacggatggatgggaacggaacacacgacacttgggacattatgatttccccaaggggaatttgggacttgcacacttggattttacgaacatatttgaggacatggatcctcgcaggctttttattcttgggatctgactgagatatttttgtcgtttcatctcaagaccatatttggcagctctgccgatctgccgatctttcaggatagaatgaatggaatgcgattgagtcacattttgtacagatctcttttgcttgagtggaattctgttttatgttcagcacacagcgtttttttttttttttttgctcttttgatcggatcatgtataccacagcctcttgttcattccacgctgtgttcactttttcacttctcacacaggactgccaatgctagattagtccttacgacacaatgtcaaaaatgataccaaagtcaagccttcatttataactcaatctctccaataacctacaataagtgacattggatatcaaaagccccttcccattagtttatatctacaggagtgttgaatgttcttggctaccatttgctacaagactgtgtttggatatcatctataacatcaggaactatgaatatattcaatgtctgattatcatctgcttctagaaagttgtgcctcaaaaactcgtcaaagaggtgccagctgttaaagagcactcccagtaaccggacgctggtgacaagcaggctttcctcgtcaatgctacctgcaggacacaatgcaggcaaaacccatcaacaatgaagaaaggatataaagcggaatcagtatatatatagacgtcaatcattgcatgatccctcgccatcaatttgcgtgaactccgacaaatggcagctcagagctcatcactaaagcctatttccggatatactagcctgccgccaattctgacagctgcagcagcagaagaagcgtcctgcagaacgttaggcgaacaagtcgtcatgagtccctcatgaacctagttaaagccctaacaatcaacgttccgagtctggactcccgatgaacttcaccccacaggtactgtgtctttggcgtatatagcccactgcgtatggatttcattcgacaacggcgaaggtttcacggatattttatccttcaagataaccattcggtgggatgtttttggtcgtaaccaaatgaatctcaccaaatggctatctcgagggctgcaatatccgtgagacctgcctcattgtagagtgagagccgtaccctgtgggagccaaatggtttgcgggcggaagcatcgagaatccagactcggaacgttgattgtgagagttttcaggaggttgatcagcgactcataacgacttgtttgcctaccgttctgccggaccattcttcagctgctacagctgtcagattggcgataggctagtatacccggaaatagggtttagtgctgagctctgagctgccacttgccgcaccatctcacgctgctgatgcatgggatagagtcgatcgattctcttcatcagacactttcagccactagccaattagatttggaggtgatcgattaaatacctggatgagacagcaggtaagcaggtaatcggcctttggtagagccacgatgtgctcaggtgtaagatggaagtaccagagcattgccttggtcggtgcgggaatgatctcttggaagatttcaaggatctgcaggtgaacagttccaaattgatccgtaaattcacgacataaccatacctcctcatttttcctcattttccgggcatgaacttcacgaattcctgtcgcatctatcaattcggacagctccgactcgtcgtcaggattgacgatgggtacttggggaaaaagtaattcaaggctatgtaaacgaaagattgaggttgattccgttgtccttatcgtcgccgttatggagaaaatgatctgcggagcggacgatgagtcgtccgtgggatagatatatatgtatcaaaagacatcattctgcacacctgctcaagcttcgatgagaagggaaagtgggacgaagccatgggttgaattgagcaagctggctgagagggagagagagagggagaaaggaagatcaaatagagcaaaattcctatctgcccccaggcagcaaggctgcctcaacaaaccaaattgtcttaagatagaagttgcggtgagaaaagtggttgccaaccgtctcacatattctaatattgactgaccactgcttcacctagaaaagagaaagaaagaaagaccagccttcagaccacttccatcacatcccacaaggagatatagttcgtacagcgggaaatgacaagctgcacaaccagcaattcattgacgaactagcactcaggatcctggcactcctggatggccaggaactgaggcagtttcgggaatttctctagggtataggtaacattccgagaactcgctttgttcccacgggaccgaacgtagtaggtttcactaaagtgacggaggaatttattggccaattcctggttctgcttgttgtaggaagcattcatgcgagacatctgagtctgttgtaaaatggtgtagtcggtggcagctcccgcgtagtcctcgatgagaaggaagtgctcaatctcggtatgagcaggacgtggcgtcaacgatttcattggaacaaatttattccttcctacagtcactgcagcagttggcgcagtaatccagagtgtagtttcgaacgccggtgtagttggtcggttcccactaagagaggaagtaagtaggctcgagatcgcatcactgctgaccacgcctgtgaaactgtcgctcacgctattaataactaccgagaacatgcaatctggcaatggccttgaaagctcgattccaccgactggggtgtcttcccacgtcatgactgtcttctgcgccatggctttgaagattataataccgttctggcagacttccatgctaggtgctcgaagtactgataaccgaactctagcatcgaccatgcgacaggaaactagtttgaaccaattctgggatggccttgaagttggcatatggatgcaatagactacaagtgttcaatggaagccgactttggataatagaaagttacagataatgctgaagaccagcccgcgggtcagccttccgaaactgcggctttgaagactccaaatacaggttaaatgatcaatagtccatggagtaaccccctctgcctgcacctccgccaccattgtgtccattcttgctgtcgtgttgcccgtcgtgtccagtgctatgatcatctagcgacctatactggtagtattcacctcgaccacgacctcggccgcgacctcggttgttgttaccgcgcccgcgtccgacacctcggccacgtccacgatgagctcctcttcctcgcggactatcatcgtattggtgacgtccatcacctccgccgcgctgggaggagtgatagttgccgcggccataagatgggccatcagagccggtgttttgattgggccagacgacatttccgtcgtccggctggaagcgtctcttttgactcctgttcaagggttgctctccttgacgatactctccgctgtcctcgactcgtaggacaaccttctcgccgaccacagtctcaaaggtcatggctttgtcagccgggatggggtgccagttttggatcttccctgcatcgatgaggcgagcacctttgcgaacagccagtactacaattggcagtgggttctccgtgtgataaggctccgttgccgggataggtgccacgcgggctgcccatatcttgttgtccagatttccggttccggtaacctgccactttagtttcttacccaggcctccaaccttgtccaggattgaacgaggtgctgggcgtggggtgattaggatgctgttagccatgtacttcaggtcatttgattcaccaagccctggggggagcagtggagccagcaacttctgcgtcatgctgtttgaaacctctggagaaaccagataacctgtgtagaagacgacacgcttgatatacaaccgcccagagcggcttttggttacgttcaaagcagggttccgcagtgtgaggttgtgggaattgaccatgcgctgcacctcagaagcctcagttacggggtcaaggtatgtgctgccctcggttacctggatgacttcagcaaggataggcatccgtgcagtagagggtccattttggaagtctctgttcagacactcaaagaagtctcggaagcctttcacactagcagaaggttaatacattgatatgctcggattctccaactcggttgccacaggacttactgtctgacacggtcctcgtagacgcggatttccgcagcctgctcgtaagtgaaaacaagatcctcgagaaagttttgtttgaagttcattgtggtcgcaaaccgttgaccatgtggaccaacttcgggtttgagaccaattaggtcgaattcaagattttgactagcgaccatccgcttgatgatatctgagaagccggcctcacttcgaccggtcagcaacaccgtgagcgcatctttctgctccatgctattcctaaccaaactaagctttaaaaagtcagttcaaaacacccgcaacatgtaatatgtgatagaaggcacacaatttgctcattccaccagccttcccatttgcggggctcttctatctccatgccttttcctgtagcggcgagaatgttggggtcgtgccaccatcctccagttgcgaaactatcattggtttgaaggaagccgactgaggagccatgccataattgtgggtttggtagaggacttagaaatactgaaagtgcgaatgttagaatcgagtgtcagaccatcctaagctttgcatatgctcacaggtgttgtcgaaatcgtagacgtgaattgcgcgaatttgagaaacagctggaaaatatgaaagccgttagaattataacaggagagtggaccatagtgagatcgaacctggcagctccttgttcacaatagaccagcgtcgtagcgatgtgatcgtatgcgggcgattaatcccgcttccagtgctgtacgacatattggcagcagagccaaatcgtgcaaggttctctgaaacgactgctttggcagatcgcattctatcaggttaaggggagatatgtcgttagcgcatagttgggagagaaagagggttgaagtcgcaaaaacgagcaggcgcggtgacggagctcccgagaaatcggttttgccgccgggaacgcgataaacgggacaaacgtgacttcgagaattcaacacctgcaacccacccctagcatgtcgcctgtatggatgatgtcgatttgcgacaggaaatcctccagcagactcttaaagaggtagctggtgaggagaaagaggcggcaaatccttgtgttatttgcctagacactatcaccgagccctgtgtggcacagccatgccaccatgtcaacttcgacttcctctgccttgttagttggatcgaacagcaacctaaatgcccgctatgtaagaaaccagtgggcaaaataccgctgactagacctgactgacaatccaacaggtaaagccgagttgacagcggtgcaatacgaactcaacgccacacaaggtccgaagctatacaaggtcccgcctccgagcgcaacattcccgacagttccagttactagtcgatcacgtcctggcaatcgctacggcccacggggagggcgacgtcctccacccccgccgcgaccacagtcagatgacccgctcgagcgccggcgcaatgtctatcgcaaccgaacatactccatgcgagtcgggtccaatcggttatctcagtatcgagaattgacaccagacctcttcgctcgtgacgaggagctcgtctcgcgtgctcggaaatggattcgccgcgaactacgagtcttctccttcctgaatccggaaccggagcatgaagagcggatatctcaccaagtttcgcgccctggacctcagcggctggagaatcgcagggcgaataatgccgagttcctgctggaatatgttatcgctatcttgcgcacggtcgatctcaaaggcagtgctggacaagcggaggagctgttgcgtgatttcatcggccgcgagaatggatgtctgttcctccacgaattgcaggcgtggctgagaagtccatataattccttggaggactgggatcgtcatgttcagtactcgaatactccgcgaagtgtgtctgacggaggaaatagggatggtcgctcgggtcatagaccgactcctgtgaacaatcggagtagaccacagaggtcccgaagaccatacaggcccaggtctcaagatgcgattgatcgctccaggcggctgcagcaagctcaacagcgatataatccatattagatgtgcaactagatatgaaggtgttacatccatattgttaataattgtctagggaaataatcaatctctggttcccacgttaaaccgtttcagactttgtgcttttcatttagaaataatattttcctcccatgcaactctctctttgcgacttcgaagtcgatcaagtaaaatcaagtactgtacctaaatctgggggatgaacataatcccggattatgaactggtactattattcaattgcggtatcgattatttcagtgtttagtacgtagttctcagatctggacaggcagggtagagggctcgggggtattgatgcgctatgaatatctgagatatgagatgctatgtagttatgctgaatatgaatgttttaatgtagtcgtctctccatccacgaatgaagaacaactagggctgaccgattcttatttccggcggaaacgccctctaccccgagaggaacctcctctgttgatgcttattgatcgatagttcgcatgagcttcggctttgatcttccgaggacgaggtttctttgcttcgacagtctcagcaggcttcttcggaggtttccccatgggttcttgttcctgtggcttcacggaagaggatgaaacagcttccttgattctctccgagaaactcttcggtctggcaacaggctttggctgtcctgcgaattcagggtcatcgttcgagtcggaatcaaattcggcctcggtatcaagctcgggctccgacatggtatgaagggaagcggcctcatccgcccgttcaatgtcactcgggacatcatcccagccgtcactagccgcaggtggctgttgcgtctccggaactgctacaacatcatcttcatgttccgagtcctcattcgcaagagctgggtttggtttgggtttgggtttcggctgatgaataaccggcctcatgatcactcgtcgcgtcgtccgtttctggcccttcttcttgtatttccggttcacatctggtccttgactatcctcaacctggatcttggcagcttcttccgcctctgcctcttcctccatctcgcgcatcacatcccagtcgtcatccatacgctcctcctccatatcccgcagtccttggactaaatgcgttagccccttgctggcaaatctttgcggcttacgcgagacaataggactgagtcctggaccatcattatttgcactaagtggaggatatcgaccagagttggaccgacggaggaaagatggtgtcccagattgcgcttcctggggtgatatttcatgtgctgggtttagcagatttgtgctctgtgaatctgcattatcggtcgcttccaccatggcggcataacgcattgtcgtcggtgttgcgaatagatttgcaagatagaactgcttggtctcagatgcaggggttcgcgcaagcctgggcgtctcctgctgaggctcttcttccggggcctcggggattgtgcttacgggctttcgtttggagggtgtgcggaatgcggcagctaggttattcgttcgccttgtggcggaaggcgttccaccactcccgccagattcagatagcatgtcgaacaggcccaatgtctttccgtcacgctgaggcgtaggcccaattgcggcctttaatggcgatggtgctggtagtccttgccggtgtgtactgggactaaagagtctgcgaagagtcgacggcgagtcatacggatccagttgtgcagggtggtgcttggtacgattgttggatggagtcgcaaagagccctctggacgatttgcggggtgtgacttggagagatgtactatcctgaccggggggagatgcatgtttccgctttttcgagtggctttcatatccctcctgtcgactgttttcgcgccggcttagagatgcttcaagtgccttgagacgactgtattccttgtatttagcagctagtgcatcgaaacgtttttccaattagtgatttatttttttagacattatgcaacacgagattatcgacctaccgatatccgcgttttgtttgatatcatcgcgtccagctttgcggcccctattggctgacgagaaggctttctcccacgttttcaattcggcgcgaacattgacagcttgtgcaccgacctcagcactggaagtcagagcgttgtcggccattattgcattgtatgtggtatcagacaacctagaagaaaagcagtccgtaaatccatcgatgcgcgtcacgcgacgcgaactgattaacgacaagattggtaggcggtctaattctgcaattatcaatcatttcaatcaacaccacggagtaactactccttggaaaggatatgttcatcggcttaatttgcccaaggtaataaaatggtggctttctagggctatgtacttttacctaggaaaaggaatgccgaggatcatccatcataagtggacttactgccaatcgtacattgtagcgcattccctcccagctacccgtacgaccactcggggggaggtacgtagatagtcactactggcaatgatacagcgaattggaagtatttaagggctttgagatctccagcggccaatgtcttatctctaagtgcatatctaggctcatacgtgtggattgatacgtagttaggttttgtgttgttggtgtctttttctaactgaccaaaagcttgtcgtaacagcactttgctctagacgagacacagctctggcatagtagctttctaatatcgcatttcgcccggcgttgtttgcaaggatgatacggtccttgaactatacgctcacatttcgggggcatagttgtacggttgtcattgtggtacaacacgaaggaagtgaagaaaaagtgggagtcatcgtactaggaacctgggaaggccttggtcaagataaccgaagcggagacgcgaagaacggcacctagcgaaaattgacggatgttccaactgctccacatgcgaaggactaaagaagtgaagccatccctcctttcgtagtcgcaacagaaatattgggattatggagcaatgaccccgcggaaaactgttacctcatcttcatccccgacaagcgagccataccaaataccaaacgccgctccactgccgactccacaaactagggaccccatgcgaccccattctccgtctccatctgcatctccacgttaaagcaaggaagaagatccacagctccgccggcaccactgatctcttccatccaaacctgaggcatgtacgaagggcatatcatcgcgaggctcatagtatcgtgctcaaagattgtgagcatgtcactgcccgtatcatttagcatgctgatatggaaaaaggcgccattaccaccttccaatagcggaagacggatacgcgctttgagctaaagccaaaaccgcatttagaggatatttcaaaaaaaagggaaagggattagtgtccatgaatgtaagggccatgtccatagctggccttctgtacacattgctgcgaggtacggttcccacgctatgttatattagcgataacagaaaagataatagagattagatcaagcttacctcgcagaaatacggcttcttggccgcaatacactcttcttggctggcaacacgcccgccgaccacgaatacctcgtcgttcaccgtgattgttccgttttgataaagctcaatcacggtggcgacattcttcgcttgacttgagcggtagagagggtcattcggatcaagcacgcgcgcaagagcggcagctctctgctcgttggtgggtggagggcgaggcaagcggggctgctcccagaattcagcgggaggttgtttctcggaattctgattggattcttcgggggttggcgacattttggattctgtaaaatggaagagaagaagcaaaggagaaggtcttactgagttgacgaaatggttagattcaaaccgcctaccaattgtaggtcgctcgttacgcatatgacggtttccgagtagcacggcgaggagcaaacatcgttcgataagagaatgaactgcctggcttcagtcggggagcagcttcgagattttaattataatcacacgtcattttcgcttctgttggtcgcagtccttctgctctattttctagacagctatatcgaatgtcgtcatcaatctgcgtccacggcacctctccccgagcagtgcctgttcgaggataattcactcggtactagattataagaagccattcgtaccgtagcgactccagaagaaggatattagagtttaacagagtgaaagttgccttgaagcatgctccggataaaaaaaacgatctgatttgatcactgtggttcctggtgcaatgcaagagacagaaaaagagcgaaaaggatttgatacataaaactgaccattcaactctcgcccaaagagccctgtcttcctcctatttccctcgctatgaatgcattaaagatcgccatttgaatcaaagttaaacctagcaccattatcttcccattaccaactcgtcaaccctttcacccgatcaaacccacccctcaactgcgactcaggatgaacaaccttcccctgaagaatagtgtacttaacaatgccctcgcaatgctcaggccgcacacgcgcaagccaaatcatctgctggtccttcttgcgatagatcaaaacattcgcagagaacttgtgcccgccgacatgcgatacgaagaagatgcccaccccgccgacccgggagtcatccggatcccggtcgagtcccagcggacggagttgtcgctccagctcgcgcttgatgagtggcgctgtgataccacagcgcgcatctcggcgtccgtgcgagcacagtaataccacgtagtcgagttcacaggctcgagcgttcattccattcgcgggagagccattttgctggtcgctggggtgatcgatgtatctggctatcagatctgggacgtccttttgcgtgacggagtcgacgtatgtgaatgacgggaggattagtactgtggtggcttgggtgggactttcgtctgtagttggctgttctggaggggtgagatttgatgctgacaccttgatacgctggatcgggtgttagtggtggtaggctaaattttgattataaagcttacaccgtggtctgattttgccccgtcgaatgcttccatcaagcttcctgtcgtgtattcgacattcttctccttccagtcggattgccccgttgcgacgagaacatgggtctggaattctttgatatcgccataaagaggccttgaagtttcgactttgactttggatgggaacttcactgtgcagtcggcgcagtcatttaaacattcggggccgtccgttttgggatccactttaggaaagaggtagtcgttggtgcccgcgcggcccaaggaaagcaaggaacgcaacatggttggaggtctgataacgctgtgaaggcaaagttgaaaattgaaagtcaaggctatgagacgttttttgaagttcagggttgcctccagggctggaaatgtggagatagatatagagctcagtatctccgagagactatactccgtactccgagccgggacaaaaaacccgaaccccgagctaatagggttatctccagacttgggtctctggtgttaagtggagatcattatacgagacccttttttatctcggggatggctttttagtttagactgacggccacttaagagtccatgtatttgatctttatctggcatgtgaaaggaaccttgggagctcgcatcctgctaacttcagggcacttcattgatcccaatgaggtgtacagcccaatcttatcagatcactcaacatcaacctcaagtttagctacgttgaagaatgacacatactgctgtctgtgatatctatgagcattgatacttgtgcttcttgtatcgcatcgaaaatctcattaaagcaaggtgtaatagaacaactagctcccgatgggggcagcactggtgtaacgggcttgacgtcggcgtcggggtgtgttcaggccaggcccatagtcatcagatggaacaatagctgtgcatggagtactatgcaattactcgtacgagcaaggcgagaaaaccaagggaatcaagttccatgtacgcatacaacatataggggcagtgttgacatggatcgtggtggtgattatggctgttctcgtgattcaaaactagaccaacatcgggaatatcgcgtgtcgttggtgcccagagattgccaagggatgcagttgcccatccgcaatgcttgaatgctttccgataggccttcggggattttcagtcccgaaatgtcatggaaaggaagatacccatgtccattccatgcaagccaagtaaaccccttagtggggtctggattgttcacggaaccatcgggactggaatatgtgggccggggaaagtaaacccgatagacaacatgagggaaattgtgaaagaataagaaagaagaggaattgcttattctttcatcattcgagtgatgtataaagaaaagaagatgaagacaaacaaaacaaaaaaaaaagaaattgccacgcgacgtcggtcagactttccagattgggcggttccacgggcgcagagcgggaccacgtaagcgggagctggagcctattcccagaacttctcaaacatctcggacgtaaggtctttcctaagtataacccgagcctccaaggttatcttcaacaccgagtgcatggatgttcaagggaatgcccagcccgaacgcgtgcggaagcgtcgccgccgcacaatggcgtgcacgcagtgtcgcacgcgcaagttgcgatgcgatcgcgagtatcccacttgcagtcgctgtctaaaaagcagaacaccgaacaaatgcacatatgaagatggcttcttatggcagcagcccaccaccgtcccgactaatgcatttgcctccgaccgagggtctgcggtacctatgcctagagatacaccagtcgacacaccccgggattcggggataccgatggtgtcaaaccggccggaacctttcccaattagtgaaccgttcccaactagtgaaccacctcgtctggcaagggctggcggtccaatgcatcacgagtaccatggtcttaccgggaatgcgcttgcgccgccctatcgaagtcgaccacacgacagagagcgaaaggactgctttttggaaactgttctcggtgtgcctaaggctgctgttaatcaggaaccttacctgaatacgggtcttttacagcgtcccaagcgcccagcgccggcgacggagcatgatatgcaaacaccgtcgcaggtcgacgatccgcacattgacgaagaagaggacccattgtcacctacggaccagctcgacctctctcctcgaatgatgatgagggggcgtgagaccaaaacgcggtttagcggatcgggtatctttgccagtctagtagcacaggtctgctctcaccatttagattctaattaccaaaatacggaggctgactattattagtttccggatataaagccatttgcagatgagatcaggctttctaccccaatcttcacgcaacttcagtcagacctaagaagggttaaacgcgggctattgaaacatatggtgctcaacaggcccttccccgatcctacgacggcttcgctgattaacatgctgccctcgcgtggtgtggtcgatgagcttgtcgggttgtatatcacttatatcgagtctactcaccgcattcttcatgttccatccttcctacgagagcttgaccaattttgggccatgttagacagcccggcatcaatatctgctgcctttacagttcaggtactgttggtccttgcctgtgcctggaaccttgcagattttgctagtctgcaatcaaaaagtgcgggcgaactcaagtgccagtgtgcagtggagtggacgttgcacgcaggacaatggatcgagaatcttcacacaaagcgcccggagatcacatcaatgcgactatcgattctgttgattttggcgcgcaactcccacgggatgaaacgcagccaggcttggctcacaactagtacattggtcaagcaagcaatgatggcgggataccatcgcgatccaagccgatacacacgtatctctgcattcaacaaagagatgcggcggcgaatatggacaaccattgtagaactggacctgcaaattgctcttgaccgggggatgccaccgtcagtacaaagcttcgactacgatacggctccagggctgaacatttacgacgacgagatccatgaggacagtactgaagttcccggaagccggccattgaatgaaatcaccgactcctcgttccagtctgttctgagtcgctcactacctgtccgcctccaagcatgttccctcatgcactccccacgaattaactgtcgatatgaggatattcagcgtctggacggtgagctcaaccgccatctttctcgaattcctgcgtgggttgcagcagaccccagcgacatcattacacaaaacaagatcatactatggaaaggcttgattgagaccaaactttgccagtctctactgtctgtccacactccttttgccatcgaagcactacaagaaacactctttgctccctccgcgcgtactcgcatggatgccgcaaccagaatactgtcaacccagcgccggctacacgacatttcacgaacgctgtcgctatgtatgcttggtgaatggactatccaagcctacatttccatctgccaagtgctacacacaaccgaattcgatgcctgtaagttttttctattataataattgactattagaacccaacctgataatttgcagcccaaccctcatccatctcctctgccttcattctccacaatatacccggtatccccgaatcgctcctatcactcgttgaaacagccctgatcgccttggaagagcgctcccttttggtgaccaagggagccaaagactattatttcctctcaacgatcgtcggactagtcaaagcccgactttggcccgcacaggcaactatgtacaagcagcaggttgtcgagcgggtcctgtcatttgcgcagatcctcttctctcggcatatgaactgcgaccacctcggcgataaggggatgggcaatttcaaggacaaccaggtggctgcattcatggcggctccaacaatggtgcccgtcatgcaggccgaatttgatcccaatgggatgcacccgccactgcaatctggcggcatggtgagttccattctatccttggttctcgtcttcttttgtgctaactgggaatttctagccatctggcgatttcgatcctttcttggacatcttcgattgggaggatctgacaagtatgacatttccctgttgaatggaacagttcggccaagctttgcgtttttctgcggactgcacgatacacacttccactttctgcatttgctgtactcctaaaatttgtacaatagttgaacttgctcaggatacccatagtaaataccaagaaatatagttatgacaatgcggtcattcagatatcattgcgcaatcatgaatattgtgactcgatcgggtccaccatgagatcatgatcgaaggcatcaggattgacagcatgcagggggtgcagatcggacaagggaaagatcaatgccatgcttagcacggattcttatttgcacccttactgacaagtgccgagccttatatgtgactatttttctctagctttgacggttttgcgttgctttgccttgtaaagtgaagccttgtttgttactgatcgtcatgctacgtagctattgtggggatgatattcaataatcgactttgcagatcggggtccaaggcctacgaacaagctttgcagatcataccgcagtgccttttcaaggacaatacaaaacagcagaaatataagcaataggatgaactaaaaatgtaatctgatactgattcattctaacgaaagccaatcagaggaccctgtacctgatacttgcgggtctggtacctggcagtacctcagctcaaggcatagaatggctctggatcaggtacccccaggtaccattccaaatatagcggcgtctatgtaaaccccctaaaacacttggctttggcactaacttgaggctcgagggctgtgcttttttggatttcgcttttttccttgcgttgcatgtttatacggagtaccatgtgtatctctccgctttactccacccgttctcttccccttttccctgcattgactggacattaatcagagagtcatgggtatcacgatctaataaccccaattccccggccagccaggccaatctctttcataaaatccctgcatccacaacggggatataatccaatgtacataatcccgacgatgcatcacctcccactactcttatcaataatcatcgcggtcgcagctccactagcaggggccatcccagcccaagccgggacacacagtgcgacacaagtataccaaacaaccgacaaatacccactcgcaaacccaggcaacatccccgcccacgacccaaacatcatcctacacgatgagcactactacctattcaaaggcgggatcaacatcccaattttcaaatccgccaatatatccgggccatgggaaaagctcggcacagtcctagccggcgacagcataatccgcaaaggcaaccgggcacgaccctgggcgccaacaacaattgaaagaaacggcacattctactgctactacacgctgagcgcgcgagggtcccgcgacagcgcgattggcgtcgcgacgacaactgccctcgatggcagtccctggactgaccacggcgtcgtcattaacacgggcacgggtgctgggtcgggggtgtggccgtacacgatcacgaatgccatcgatgcgtctgtgattgttgaccgggactctggccaggcgtatctcaactacggaagcttctggcgtgatatatggcaggtcccgctggcggatgatctgctttctgtgaaagatgctgataagccggatgcggtgcagttgacatttctcccacgtgttaagcctaagcctgaggaggggtcgtggatgagttttcggaatgggttctattatgtttggtttagtcatgggaagtgctgtaacttccagagtggtttccctgcgcgtgggaaggagtatagtattcgggttgggaggtcgaagagtgtgcgtgggcctttcgaggataaggatgggaggtctttgctcgatgggggtggcacggtggtttatggttctaatcatggggttgtgtatgcgcctggtggcttgggaatcttggctgggaataatgacgtgtcggatattctctactatcattatttgaatacgtcgattggctttgagcatgcggtgagttgttcttgtctttgtcgtcgggttgggatttgaactgatatttctcgttctcccagcaagctcagctcggctggaactatctggactacgaggatgggtggccggtgcctaccgaaggcaaagatgctaccacggccaatgtcgccttcggttatggacctcctagctggggttacctagcaagtgttttgggtaagaggataatctcctattttatgtgtgttgtatgctgatactgagtttaggtgtatggctgtgcatggggccatagtagtggtcatgtcttgtttcttaaattccctcacgttcctttcttcgcaattttcagcgattgttctatatagcgtttttattccgacattatgcctatgaatcgatctagcgagcatttcattcaatatatgtcattggaatatcaagccatggcgctaaacccaatccatgccctaacctaatcttataccatcaaacttattcccaaccaccatccacactaacaatctgtccagtcgtatacgacgaagcatcactgagcagaaaaacaaccgtttgagcaacctcctcgcccgtcccaatgcgcgggatactagctggtggcatactaatcccaccctgaatctccttcgccatgtccagcaaaggcgtctgaatagaaccactaccacaaaacccaattagcaaaacccaccgaaaaacactcttccccaaatactcacggcgcaacagcattaaccctaatacccggccccacctccttagaaaccgactttgtcaacccagaaacagcatgcttcgtagtcgaataagcagcatgcaacgcaaaccccttaatcccctgaatactcgacgcattaacaatactgcccttccccccaggcgcagtcgccgtaatcgcccgcagctgcgcgcgcagacagtacatcaacccggtgacattaacccgcatcaacatatcccactcggcgtcgtcctggtcgacgaatttgctagtgccgtggttcttgccgatcgtgccggccatgttggctgcgccgtccagtcggccgaagtgcgagactgtgctggcgatccagtcttgtacggcgcttgcgttgctgatgtctaattccgttgtggtgattgtcgacgctgtggaggaactggagtcggtttcgattatttgtcgtgctgctgagaggatttgcgagcttaggtcggcgagggcgaggagagctccttgcttgtgtagttggcgtgctacggctaggccgattccgctgagcccggttatggcgtatactttgcctttgacggagtccattgcggtggggtttttgatatgtttggtctgggaatgagagatttatgaacttggagagtagctgtgttacttgaatgattgcggggatcggagattctccgtggctaatatgtatgcatgtccgggtatattcgagctgcatacaacatagataataggctaaatgatgtgtttagaaagttgaatacccgtctgccccacgagatccattgtataaaatcgagaggatatacataccttacgaaagcaagcatagagtttgcataagatgatgataatagccttggcttattgatttgatcaatgcatcagctgtgtattctattgacctaagccatattaattgaatatatatccgcgacttgtcttgcgtatatcagctttccagatttacatcaatatctccacatctaaccaactccaaaatcacaaatgggtatctcaaaatgcaaaatcaacactccaatctcaaataaacatccccgacagaagcattgtcccaaccaccaaagccacccatcccaccggccgcctcacagccccagaattcttctccgttttggtcccatatacaaccccatgagcattcaagcagtacataactttcttcgcctcggccgaagaaggcacatcacagatcgccgtacaaggatcgggatcctcatatatccacaccccattcgggcagcaggactgcagaacagctttcatatccctgtccggggctttcgtctggtacagcggcacctgattataatattcgatattggcggggatggcgggcaccgcgtcgcgcaagtcgtagcactcggccggctgtgtgaatcgtgtgacgttggagtcgctcattatggggggtgtcatggtgttttcccttgccgggtgatccggtgcgaatgctttcgcgacgcgacgcgaaacagtattttagctgttatttatggcggggatgtgcagtgctgttgatcgcggttcgtggagagagagggaggcgtggttcgacaatgcagagaggcgggatggtcgggggagtagagagaaaggacattcggggattgttcagagcatatggaactagtaatgtcctccaggcctctctttttttactcctgagcacgggggggcaaagcgccaagcccgcattcccggacgttggagatatttgcctgacaagtggagatgcgggcctgagtattcagcttgcagcgaactcctttttgggcatcaatctaggtaatgctgttagagtgagacaaaaaggggaagtgggaactgatatttcgatttctccttgctgggctatttacttggtgagctatattgcatgtctttctatatacggactagtacggaggacttctgctccttacggtcagatttacagccgagcggtttcattggctcgcttccacattttcttcctacgctcatgtccttcgttgaaatcagacagccatttctgatcgaacggaggtaggcgccgccctgcaccaccacgaggttccccggctagatggcggaggctctcgaagtagggctcgaagtcggggttgatgactgtgaaggcggggccatcgctcttctctgcgatgcggtcggtttcccatttttcttgctcggcgatcgagggtagggttatcttgccggctaaaaagcgtgcggcagcaacagcctgccattcgaagactttgaaggtcaacccagcaccaacctgggattattgttagcgtttgatccggggaaaatttatcgacttgatagacttacagcgcctacaaaaacaagtgttggatcatgtctgtagaagacatgttggtagagatccggcacacgattgttccgcgtggcaacctgaggcaagaaaggcagagtccagctgaagccagttccaaaaatcaaatagtcgacatcagtctcaaaggtaccgtcttcgaaatgcacggtccgttcgccttggtcattactcgtaatgtgtgagataggcgggcgacgctgaattttcgggtgctggaaggcgagatctccgaaataggcgttgtaacgaccacgaaccacagcaatgactggtgtctgagcactatcaatcaggctgactgcagtatcagcagcagaaacagacgctccgacggttatgactttctgcgatgtgtaagcaggtggtagaatgacatggcaggaactccatttacctttccccgatacttctcaggcccacgataatgcttcgtatgttgaacactgccaggatacctcgcagcaaactccttcaacccaggaatcacagggataaacggcactgcgtaatggcccgaagccaccacaactgcatcatactcctcagaccaccagtaatccgacgtgacaccgtccagcacttccgtcctgcggaatgtaagcacccatttcttgctgctgggatctttgatggcgcgttcaacagtagtattatactgaacaagatcttggtacccctttcggttaaacaagtcctcaatatacttccggatgaccgaatggtgccggaaaggcgtgtctgcgccatggcgctcgatcgaccactgggatcgaactgtaggaatctcctcttgcgagaacgacatggctcccgcgttaacattagtctccagcgtcgggtagacgggggagtccgtgaagcggtcctgggaaactacaggcgtccggcacgggaggtgctcgggaattttgagaggcgcatctgctgttcgcgcagctagaccgtcaaagtcgaactgctgtgacggttcgtcatctctcgatacccttttatttattagcgggaatcgctgaagatagtagagtaacatagtgacataccagcatccgccggctttctcttgtctctcgaatacatggatgacatcgaatgctttctcttgtgctagtgcatcgactgtaatggcgccagctgggccggccccgatgatggctacgctcttgatctgcggcatggtgtgatatttatgtttggtgagagattgggcgtgtagccgctctttatcatccaatgccgtctcggccgagcacccgaaaaggcaatatctggggtgcaaatcgttcgactctatcacgccatttgactgtgttttagcgcaaagttggcattggcggccaatgagggctctggatatcgtatataggatagccgaggtcagacttacgatatgtaaatgagaaccgctttcatttaatacattaatgtcgaattgaacatgctgaatcactcacattacaagtttttcatctttgtccatcggcctggcatttcatccgttgatctgattggctgtcggcattgaagttttaaggtcacgtgaggacatcccgggattcttcaggaactttattctgattggctgggagtttacgccttggaatttaggccataaagtcatacttctgtgtttgtttttctagttcggacgttgaacgggcattatgatttgcttcaataacaagagataatgcaatttgtaaatgattatacaaggggatcgaagcccagggtgcaaaagccgctaaactaagtaaacacatcggtagcataccgctccttcgtccgcaaattatcaaagaacttctcagcagcctcatcctccccaagctcagcaccaggcggagtctctcccttggccttaagctcggcgtgcacagcacgacgcctctcgagatacatatccttgcaagcctggcggataccagcaccaaccccagtgctaccgcacacatagattctcgcgccttcttcaaacagcttcaccagctcttcacggtcctcgagcatgacatcctggacatgctgtcccttgcttccatcggcaggacgactgtacgcccagcggacatcgacagcgcccagcgcagcccactcggcaagttcagcagcgtggatatcgtccaggccctgggtgcggcagccgatgtacagcactgccttggcgggcttcacagccacgttctcatgcagctcatccgagtcaggcgagctgcgacggccgcggatcttctccgcgcggtccatgacgaatccgcggaacggtgcgagcccgctgccagcgcaggccatgatcatcggtgtttcgagatcaatcggcggcttgaagccggagtgcgaggggcggacggtgatgtgtgcgcgttcgccggcttggagctcggaaaggtagtttgatgcgacgcctaggtagaggttttcgttgctttctggggtggggttggcgagtgctggagcgctgaggacgctgaaggtaatcgagcattcggatgggtcgactagcggcgacgaggagatggagtactgtcgcacgcgcatgggtggcagcattgcgaggaaatcgccgagggaaatcttgattgagggataacgggtgagaagatccagcgcgctgacgcgcttcttgacgatttcttcggtgaagcggctggggctggaggcgagatagcgcaattcggcctggagttctgcatccgcaattgcggcatcggcgaggacattgagatcgcgcttcgaagcgggttgggatagctcgatgtaggtggataggagctcgaaggcggaaatgggcgtgtcgatggggatcgagggggaagctgttgagcctgagggcttttggattttaatcacggcatcccaggggaggtcgaagcggcggatcgcgcggcggacgattgagcttgggttgacaggtagcacagcgaggtaatcaccacactggtaggtcatgtccgttggcagcttgaacttgaccacgcgtttggctggggctccgggtggcgtaaggagctcgttttcaatgacaaagccctcttcgagctggagacccagtgtggatgcacgcaaacccgagctcacttcgacctgcaaggaagacttcgacttggctgcgttttcaggggtagctccaccgaatttagccatcacggccggccagaatgaggtctcgccccagccgtcgaaatcggtgaacatgtctgagtttgctgcgtcggcaagaccaatctcacaaagctggttagccccgttgtccttggcgatttggtcgatggccttgggaatacggtagaaggtggacgaccaatcatgatggccacagccgaacactgcgtagttgacaccttccaactcgctgcccttcagcccactgatccactggaagaagtgagccgcgttatccggaggctgtccttcataagaagctgagatgaagaccacaggctcgcccttggggatattctgcatggctgagtccaaagaacttgtctgcgcagcgtacccgtaggcagtggcatcatccgccaacctgcgagcgaacgcctcgcaggttcccgtgttgctgccatagaacacgtgcattggcttcagcttaccatccgcgtgtgcggcgaccttgggcttgcgatcccggctgccagcgccagtctctgggggcacaacagcagagccgctgagtttaacgctgagttgcgtggggtcaagtccatctctcagggttgccttcatgtggaagtccttgggcttgatggtaagtgtctgcttgatgcggagatcatagctggggttatccatctggaagttgaagttctgcagcaaaatcgcaaccacaaggagagcctcttgccatgcgaacggccgtccaatacagccgcgcatgccgtttccaaatggcttccacgcgttcttgggcagcttgtcgaagttctcatcgagcatccgctctggtctgaactcctcggcgtcggggccgtagaccttggggtcgcgatgcattttggtaagcataatagcgatgacctcatccttattgagcacatatttaccacctccaagtgtaacaggatcttcgtggttcttctcggggtgggcgtgtaaggcaatcatcggggctgttggcttcagacgcagcgtctcgcgcatgacagcgttgatgtatggcagcttggacatgtcatcgacggtgatcttgcgtttaccaataacactgtcgacttcctcttgagcctttctgtatgcgctcgggttcttgagaagatagtagaacaggaatgacagcatgccagaggtggtctcgtggcctaagaaagtcagggctgaaatattgcgtccgttggaggattcacttaccagcgatgaggaacgtgatcatgttgtccacaatcgacgcatctgtcatacccttgccagtctgcgggtcccgacccaggataagcgcattgagaagatccttcttgtcaacggggttctccttccgcgcatcgaccaattcctgagataggttgcgcagatactcgatatcactccagtacttgttgttctccgaagtaggcagactgttgagcaaagcagggcgaagactgcgatgtccagaacctaagagcaaaccaaccattgcctcgacaaatgggtgcatttcatcatggtagaacgagttgaagcgagtgcccatagcgcaaagagcaatcgtatccagtgtcaagcgagtgaagtcatccgtaacctggataggaacggtagggccagcccgagcccatttcataaccagttgagttgcaatatcatacatctctgaaagcaagttagccaaactcgttcgtctgcctgcgtgccgcatagctctgacccgacagaaaagggatacccaccatcgaacatcccgcgaatcatcaacggaccaaaagcaggaacaagaatgcgatgggcaaccgcccagttctcttcgccgggatagtttgcggtgaagagaccgtcgttgacaccgttgcgaatttcatgcagaccagcggagaccattttgccgaaacgttcctcatcgcagacttcatctactagctcgtgggagctcacgaatactcgcggtttgccaaagatggttaatcgaaagatggggcctgaaagtgagaagcacaagaattagcccatgatgttcacactatacgtccctgaccgtgcagatctccataccatagttatcggccatctgctcgaagctgttcacaggcacctcggactcgatgtcgtagatgtttcccaagaatgggacacccctggggcccggaatcgggacctctttgactgaagccatggcgtataaagtccgccgttcaattggggagtttgatcaatttcaatagttggtgtcgtgtcacaatttggaatacgtaatgatgtaagggagcaatggcggggtacctggtcgaggtcgtaatccggtcagccgctgtacacttatgtcgaaatgacccttggagctgcagatgcaataggatgaagaattaaaccaagcttgggagattaaatcctgaactcaggaggaattgcaaagggttataaacgaaaaagtgtgacctcaccgactgtcaagcctcggttccttttttagtgtgctcataacagcgttcatcttgcatatgggatcgctgcacaaattacataacttcatttatgttgcaattcatttgtttcatccgcgtcgcaatgcccggatctatgacggggcatcggtcgaagcccaatcacgatcgccgtgtattaatcggccgtgccgagaactcgtccaccgcctgtcggatttgacacgaatcccgaagacacggcattgtataaaggcacatccgcacagccgaatccactatatccacatgcttagactgtttagagagtcgcctcgcgggaatatccctcttgggtcttatctaactgggtccggcccattatcgccccgactctggtgttgggcccacgtcttggctatataagataaaaatgtactccgtttgaatccgtcttgcttccagaatgtagatggtgcaaatactgggtactaataagatactagactgggctactttccactcaccaagatcaaggggtaagagaattgaaagaaagggtttgtatggcaatatatttacatgaatggagaagcatattgcaaagcaaaaggcggcctaaacaacgccaacgaagggaattgggattcaaggatcaaaaggggatatcaacagaatggagcggacgcgagacagaggcaagcgacagtaggaaaaaaacgacggtaagccggaaagccgggacgaaaagaaaagggacattattccggctccttcagcaaccacagatgcccaagattcatgtcatagcgacaatctgtgagaccggacatggcgccgaccgaaaggaagaagaatcacggaactattcattatacaggtccaaacgcaggttcgtggggtcactagtgcggctgacaagccggctagttgtggacctgctgataaccaccgttcaacttccactcgctctgcctccagtctttctggaagttctgcatctcatcgcggttaagaggaaccgggttgttgcctaatgcgttctcgagacggcccttgcggcgctggcgcaggcataagaacagcagcgctgcgataccaatggcaccggcggcggcggcgccaacgtagactccaatgtgagctccctcgccgagatcatcccatttttctgatagagacttggcctcgggcttgttcagttcggtcagtacggtggagtttccgctgttgcatctcattagtgatatcctgattggctctagattgggcacacttactccaccactttgatgctctcccatgaacctgtctggtccccgtaggtgtactccttgccagtgtggaaatccttcacacgcaacttgccaagggtcatagtgaaaggcgcggaatcccagtcgacaaggccaccagcccactcgatagtaccctgcgctgcgcttttctgaccagcaggccagagactgaattggacacggcagggtgtctgtgggtagtttttgccgtacagggtggacttctcggagtattcgagttcgcgaaccatctcgccatcaatccaccattgcagtttatccttcgcccagtatgtggtgtagttatggaactctgtgtccgcgttcggcacatagtgaaatccgccacgatcgaaggtgctatcgttacccttgccaaagaagttggactgcacttcgctagtgttgtatcccacccattcccaatcaatctcatctagatcgtcggactccaagactacactgctgactagacctccgcccttggccatcttgacgtgagattcgacgacaccgaagaatatatagaaggtcgactgtaggagcgtggactctccttccttggagagagtgaaattggctccgtcgtcaccgtacacgtatgttccggtcgtcatagaccagaccttttcgtccaaggttgtgttgaagtcccatgtgtgttcggtgcccaaggcgggatccgcaggacatgtcttcttcgttgggtcacagtcagtcgatgtttgagcggtggcgtagctagccaaagctgccagaacggcaatgcgggagaggaacatggtgggttgatgtatatagaggattggtcagggttctgctgtgagactgtccaaaaaaaggaatggactcgagactactcgagattcgataaagagtggatgtgcaagtgcacggtaatgagtggaaggcagtctgccagcaagatcctaacagtgtgttgaaggaaggaacatcgagaaacggggggaaatcagccacgacagtccaatttaggcgtcgagtggactcgggacattatgggctagtggtgtcttgggccctgataatttttgtgcaccgttggagaggcgtaaggggaaggctgcagagactatggttgagtttactagctagccggtctaggctaggggttccgtttttgtgcatggcgctagccgtgttaggtcaagctccaggggccctgtgcatgacgtctaacctgtttgggctcgcccagtggtttctgataaaaccacttttaggcgggcgattctgattggctgctgaccatccaccgattggctgtaaaggaccccgataaccttggatcgaacaggcccatggattgccaggtacaatacggagtacgacaacatgtatactccggattctataacaggttgatacattcaacactgtgttgtagtgtgttattttccatttttagccgcagaaatcccttggctcaaacgcagaacaagactggctgtttagctcatgccttggccattcgaggggaaacttctgcaatgaagatcaaacgcccaattgataagaatcgccacggggtaagaccaggattggactacagatggatcatcatgcatgtgccccttgaaaacaacacttcaaaatcataacaacagcgtaacaacaacttatttccagagttcctccagttcctccgacctaccaaactagtattccagcaacctccgctcagggggtccaaaaacaaagccactaagaagccaagtccgccccgtcaatgagtggagatgtctaacagtttttctttttctttttttcttctcccctgtgggccctttcccctgtcttaccttcctacctgcaaacccgctcattatgtacaatgggataatgcactttcccgaacgatcgcctcccactcttattcgtcgaaacggtgagatcacggctgcggcgtttttcgttcgccgttggatggagtctgcttcgctggcgaagagttcccttaggggaaacttcgggagttctgatcgatcgaacgccactgctcggcggtgacaaacagccaagtagccaagtcctactgagccaggccaaggcataataatccctcactacggagtactcaggtacccgtcagcaagtcgtccgactggattacgtggacatccgccacatgtgaatgtgcattacaagggctgaaaaagattctcgccatgcactgggatatagatttggaaggctggcgtctacagcatagatcggattcccaattcaaaacaaagaagcatcacacgcacagaccaaatccttttcaagtatttctcgtcaagtcgtaaaaccgtgcaatcacatgtatgctgtcatgtctcataaccaacattgctccgtcaaacctgtccacccattccttcgagaaagcacccaaaaatagcaaacgccggtcccaatcgatatgttcgagaccaatggccaaatcaattcccccacaccagcaattccacatctctcatgtataatccgcaccttaattcacccctccgtcctataaaccctagccggccggcgcaaatcatcgcgatcgctatatcggcgtgaactgcgtacactagccggcttctcggcataatcgacataagtcgcagacgggcgacggcgatgtcgccgtccacgggtcttggtgctgctgcgaataaccggggcctggtagacgacctcggacgcatcattcttccacacgccgggaagtcggagtattcgccacagccacaggatcaggagggtccctgcgatcgagccgataacgatacccgcaatcccaccgccggtgattgtgcttgggcagttatcgtcgcttgactgccgggtctcgagcatggagtgtataggagcctagggaagcggagtcattagcttttatgaattccagactctgcgatccgtggttctttgttcggcccgcgcgggtgttactggggtgagccatggaagagagcttcagtaacggatcaccgaggtatgcgcttaccataactgcagcctgtggactatctatttagcaatgcttttgatctgatatcgtgggatttgaggttccagtccctggtggctggcaattgcatgcagtactccgtacagtgggtctcgatgcgatcttgactccagcacccgaaaaaaaaacgtgggtatgaatgagacgaaatcacccatgcagcagatgagaaagggaaaaagggaaacccagcgcaagagcctcaagtcttattcaacccagaatctcacatttcccctcttgactgcgcacccccaacctcctcttatcccgcttctgacgtcaagcggctgtcggtcttggcggctggaaagagcagcgatcttctctttcgcacagcacaaacttggaatttagttgcagtcggttcttgtttgatgccatgattggctgctgaccttcatcgttcttgtaataaaccgtcccggtgaaagttctttacaaaacatactgaccctcggaggcgagacccatatgaaacaggtcacccacatggaacattctttctacattttacaactttactatgatcctctgccacaccaccaaccatgcctaaaacaaataaggatatagagcagcagatccagctggccatggactctctctcagaccaatccaagcctaatattcggaagactgcacgagaattcgcggttcccgaaggccgccttcgtcggcgctggagaggtggaaattcgctttttgaacgacaacccaatggtcggaagctcaatcctgcacaggagaaggctttatgtgcaatcattgcttcctttcctgcggtcggatcatcaataactcgtcgacaaataactgacgctgccgattcaattctgaaggatggccacaacgaccctaccacagaacccccaagaatcggcgaccactggctaaaacgtttcctgaaacgtaatcctaatctgtttcctactgaattagagtcatccaatccacatgatgataatccaccccggccggataccccgtcagtcagctctgaagacaccgagtttagcactccaaaaaccgccgaggaaattcgaagaataagcgatcgtctcaatcgaaccgacccaaatactcagcccttcaaagacgggctagcaaagcttgcaaagggtgctgaggcccaggctactttggctcttcagctacagcgggaactcgatcgtacacatgctattatgggggcacgcaacgcccggtatgacgctcctcgccggaatatcccaattgctggtatcatcaattcatcctaggtcaaataaatgaagcgaaaagagtatgaattgaacgagacagccgatcaagaaaaaatgaagcggaagtggaagaaggtcttgatcgagattaggaagcgcggaaaggccaaaaaacgtgggaattaattctgtcttgtattctagtagtaattggttaatgaacacagttctttaattagatcatttcattgactacgaggtggtgtagtagatggtacttgtagtaaaaagtaaacaaaatgttccatatgggtgatctgttctcgctcgccagggtccgtatgttttgtaaagaaatttcaagagccgatctaaattggggatatcgtgccgacctgccggagtccccagcattgcagcaaacccacatgcatttgcctagatatgcatgtcacaccatgaagagtcttgtcttgttagtctgacatgcggggaaggaaatcaacggacgattcgggccatgtcgtaaataaatgcccagaaacagccctagagcctaaataacgagttgcccttgtagtatacttggttcctgtgttctatcgtaagtagctcaaacaggctcaagcctgaaacactatccagccactctaataatacgcccgaagacctaataatccttgtccaaccacacgtgtccgggagatggcggaacctgcccttcgcaagctcatatacatatcgtgccaccattcgtcaagacattatcgtgttggagccggtttcacccaatgcttaccattacctcaagaatccgcacgttgtacccgctctcattcgcatggacagtttcaaggatacgacctagaaacagcgactcgggcgccatgaactcctagctctacccgatcacacaacccgtatattctcttgtcttctctcatcgtcgtggttccgggatctcagaatgacgatcaatcgatatgtatgtataagacatgcatctccgtaaccgggttagaattgtcagcaagggcctagatacatagtagggttgttgatattctacgtagttgcaaagataaaatttatcgttcggctttcggctgtaaagtaagccttgcatggtctctctctgctcctttcatgcatagctgaaaactcctggtccaaattatccccttgatctgaataccgtactactactagcagataaatgactataccatatatcgccaatcatacgataccagattggattgactatagcatttcttgaacagaatgaggcctattttctagaatatagagtaagtagcatgtcgtcccctcgtcttctaattggcgcgtacgcatagtaagatttattttctgaattatctcgcagcacctctggtataggcgaagagatcatgcgctatggtgtaacatattacaaactcgaagcccgctatcttgaccatgaaagaatatatatcagcaccaacgtagctgttgatattcatttctatgggctcaccatccttcatggtagaagaacttctatcacaccgctggcccctgggtgtgcgtaccgaccaggcttcggaatttgcgattggtttcaactagttcttgtcaaactgatcatggctggggtggcagcgaagcatttaatcggtttaaacccgcggaacttcaagatacccaagaccatactgaactctacaaactttcaacattcgtgttcacgacaaattgacctcaaaccagatagagcatcgatcattgatatagagtcactaatcgatgccaatcgaatgagggacatggataaattgagagccaatagcaaggagctataccaatcgagcgaagatgggctctcgatctattcgctcactgtgcgtggtttcaacttccaggaaacttttttcgagtcttctgatacataagccagcacccctcgagttgctacgaggtcatctttattgactatataagcagatacatctacggatgcgagtctttgtaataaagatgagagctttgggccggtgttgatatgtacagttggccaggttggttatgcaatggaggccaaccctccctcctcaccaataatcatatcataattatatgagggcccacccccctcctcttcctcctatactccccacgacagcacctcctggctcaaattccctggcccgcttatactacagtgccatcgggacccgcttggtcttgattgccatcagggcccgcttctccttgagggccattggcattggcagcgatcccagcagcgagctcgacagcgcgatcatccgcctttctatagcagctgtatcaaagaaccaaagatcagcatattattcctacatatcccacacaacgaccaagtgacataccgcttggtacagaacttgatccactaagatgtcaagaggactacctggcgtaagaccggggcaagcgtcacaacccctacgacttttaagccgaaagaaagtcccttctcgtccacgagttggacgaggtcggccgcttcgcccgcgcggggttggagaggcactggggctagaaaaaagggttagaaagaggccaaaaaagatgccaagaaagagatcaaatttacaagcccaggccacggtaaaaaaagacaacaaaaaaaggcttaaaagagacattttgttcatggatgtgtatgttttgaattgatatgaacgtgaagttcttacatggactacgaaattggtttattgactacagggcaagcaatggcttctaggaaggtacgaggctgcaatttctcattgggaaggtacgagcctccttagtcgggtacattcatcaagatacagcaatgatatagtgggcaagatgcaatatccataaattgaagcgaatgaaccagatgagttaatccctctttgttgccgaatccgtgtcttttgccatctgcccatagctcggtggcgcgtcaatcatatcaaacgggctgtcatagctatcaccgacaagcccccatattgagactcgcgtgatccggtgcttggtgagtttgctcacgtcttcacggcgttgttctttcaacaatctcctatcttcttcggggacgtcaaagcctcgagctcgccgacaacatccacattcgagagtacaatgtccaactccaagcctccgcgtaggatcgatcttacggtcaagacaacagccacatccacgagcacagcatccttgtcggccagcacaatcttcaacgaggacgcgatgcatataccatttaggatgggaccgccatagctcaaacgcatttcgctcatacccatcttccagacaggaatgataatgccaccacatttgcgccaagagccagtatttagcattcaaaatatcaagcctctctttggcatctttgagcgagtcaagcccctccttaatagatatctcttcttgaacaacttcccggagatcttcctctgtaaagagaagcttatgtgagataaaataagggctgcaggtggcattagggctgtttgcttcccagtatcgatgcaagcgatatctttggagaatattgatatccccatctcgttcgagacgctcttcccaaaagagtttatcacctttcaagaaagtccccactgttctggatacttgctcacggctcgattttatttcaggggaggattctgttttcgcagatgattctatcttcccagaggattccgtcttcccagaggattccgtcttctcagaggatttccttctgggacgggacaataaaaacagcatctttgatgtttgagtgaattcgagtacaaaggatgattgctcggactcatgaaattcatccacagtgctgtcagcttatacctccgacacctaaaaggttgggtgatgacttaatcttttcacaatagaagctcgcttaattagatccgatcccaaagtgattcactttgggatttaggtttccgatctagcaaattcccgaaggctctagaaagttgctcttgtctttggccaagactaggttaggtgtactccgatggttccgtttgactttgtcgcagggaaggggggtatcctgttacagtgagtggtcataggcgcgaataccgtcgatagtggccctccaggagtcgggaaccctcgacagttgaagccgcagcagattatctcaatatagcccacaagcttggtgtgtagcgtcgtttccggcccaaccgcttgccttcatatgttcctggttctgctgaaatcttactgggcagaatatcgttattgaattaccggaggtagatatatatagattgatgggtttatgtaaagaccaatccagtgctataacaccagtaagggtggacaatatatgcacagatgtactcaagttctgattttcaaagtgcacgagcatgaatgtaaaaggaaaatatccaaaactccccgacccatgatatcatcgagaaaaaaaacagcatacaaccctattcatccacgcaggaggccgaaaagtcaaaataacaacgcggtatttcatctccagtcattatcgacccgtgatataatctcggttctcgatcgtcacactcttggtcatgtggttaaccttatagacaccgacaagtcgggcagcaagctcaaactagacaacatgttagctatgtcaacttgaagcggtcatcaacggcacgtaccatattgtttctcaatgaaatgacaatgaattgggcatttttcgttcgttccttgatatacgaggcgacgatggaaaccttagaacaagagttagcatacgtgtccatcataattcgtataagatcaactcacgtttcggaagtccagggcagcatcgatctcgtccatgacatagagcggagtaggcttgtagtggtgaagagcgaataccagcgccaaactggacagggtcttctctccaccagacaagttgctaatgttcttccagctcttcttaggaggcattaccgagaacaagatgccttccgagaaggggtccaatgagtcgaccagctccaactcggcgttaccgcccatggtgatcatctggtacatttctttgaggcgcaaagagataatgccaaatccttccatgaatccattcaagcgagaagatcgaagaccgtccaggcgtgccttggcaccgtctcgggatgtcaaagcgttggtcagatcggccgagcgtgattcgtgctcggcagctcggcggcggtactcctcaatgactgacaaatcgatagaggcgttttgaactttctcctccaaagcagcaatgacagctttcagggaatccttgttcatggcctctagctcatccttggtgtacatttgaagctcagtaggctcctgctcttcgccaatatcgctaatgttctggacggtcagctttgaaagcttctcctcccagtaacgactgcgtttttggttctcagccagggctttctgattctcttccaatttatttcgcatctcgatttcagcagctcttgtctcattgagctcagccacctttgcgtcaagctcgtccttcatggccttcagctcgccctttttagactccaatgcctaatgatggtcagcagcaaattcaatacactcgcggatcttgggtaaattacctcctgggcttcgtcggccttctgtctccagtcggcagattcattggtctggttggcaacagcttcttctagtttttccaactcctctgcgatctgaccaatctccttctctgagatatcgcgggctttggagtgcttcttgatgagtttgtcgttcttggacagctgcccctccgcgtttgaaatctcctcagcaagcatgccaatctgctctttcaggccatctaccttcgccttttgaccgcgaagccgaacaccaccgacctccatgatcttgctctgcaaggtctggatctcttcctcaatgccactcttctcgtcattgagttgagcgatctgcttttgggctttggcaatctgtttttcgagggcagcaacctgggcttcatctaaatcagatggctggtgctgtgcgcccagctctttcacgcgtcgctgggcatcagcaaggctgcgcttggtgctgtcaatttcgatcataatcttttggatcttagtctctaagcgtgggatttcctctgatctttccttcatctgagactccacgtgtcgctgtttttcctggaaagcctggaatttcctttccagttcctcgagatcggattccaagcgggatacctgctcctttgtggtgtctgcgacttgctttgaggacataccgcctcgggcaacacgggtaccaccaccgctcattgttcctgacacatcaatcaactggccatcttctgtcactactcgccaccggcgagcaccataggcaatacgattcgcctgctccaagtccttagcaaccagcgtgttttgcatcacactatagaaagctggggcgaacttgggatctttcggcttgacaagatcaaagagacgaggaacgctttcaggtgtgtagatcgatgccatgtcgcggcgaggaagacggtcaagaagaatgaagttcgctcgaccaaggttgttcttgcgcaaataatcgatgcattgctggccgacttccacggtctccaccaccatgttatcgagagcaggacaagctgtagaaatagccacatcgtacttctcgtcaattgtgcctagattaccaagtcggccatggaaaccatcgatacggccagattccttgagacgcatcaacccagtcaagacgcttccacggttttgcgtgcttgcgagactgactcgtgcctcgtctgctttctgacgggcactagagacgtgcgaacgaacctcgggctcccgaccagcgtatttcttcaagtcgtgtttgagcttctccacttcagactccaaggtctctttttgagcttgtcgctcttcgagttcgttttgtttggcttgcagactctcttcgatggtaacaaccttgccctgtgcttcttcgaggaggacagcgcccgcattaccacgctctcgcaagatatctagctcactctgagctactgcaactgcggactgtttctcgttgatcttcgcgttccatggctccagagacttttgcttctcggcaatctggtcagataggccttgcgtcttgccttttagcccctcgcggatggaattcagttccttctcttctgtcaccatctccttctcgaattgagtggtttcggcagtcttcttctcaatgtcgtaggtaaacttctcaaccaggctctggcattcagaagcagcaaggcggctggtctgcatggctttctctaactttttctgtttgccgagcaagaatttcttcttctcctcaaacttgacagactccttgtcgtacttggccatctccttgagcaaggcttgagtctccttctccatcgactcgtaatggcgaacccccttcttgtaggctttttcgagctctttgataccggattcgtttccttcgtgtttctcgagttccatgttgagtagctcctgcatttggagaatggcctcttccgtaacacgaacgttatcattgcactcgtcaatgtaaatttgatatagcgctgattgtttctgtgccaattcgttctcctcacgtatgtaagccaacgctttgtttttcttatcctccaaggccgtcttctccttctccacgtgctggacacggttgttcttctccacgcatacgtcgttgagagcttcgagctctgttgccgcttcatcgataggtgtcttgtacttggaggttccaataatatcttccaggtattctaagaggccttcgtcgtgttcgttggaggctttgggtttcatctgagcgatcgactcgacctcaccctgcaaaatcaggaaccgcttgtggtcgagatcaattccgcgatcacggaggaaggccgtcacagcggtgaaattggtttctttcttgttcatgtaatatttgctggtgttattcttgaacgctcgtcgcgaaacaatcagttgggaatctgggaccacttcctggccaccttcgggcaaatcgaggacttgtgagaaatgaacctcgacttcacaaaatgcaaggttgggatactgagcagagttatgaatcagcgcagagattttgccctgtcgcatcttgctggcgcggaaaccaaatacaaacaggagggagtcaatcacgttggactttccggatccgttcggtcctacgacagatgaaaaggaggcgtggaacggtccaacgatctgctgcccagcgtaactcttgaagtttgtcagaataaggttctcaataatcattcggggcttgggcgccgcgggctcctcgggcgcttgaggggcctgcgttctagacttggccacaatgtccataggcctctccaagactgtcgagttcgggtttataatggaaatttgagatgtgggcacttccaattgtctcgatggcgactgattcacggcagattcggtgatgtcggacaacggtggcacgcttgctcggtgcgctctttcacgaggctctggcgattgggatggctctggagttggaagtgagccctgtgccggcttgagtgtgattgagccgtgactcttgcggggatgagccatactttttcttttcaacgccgctttactggaaggagattctggatctacttccattgacgccatcctaactccctcgtcattctcatcattttcttcgtctatatccatcgcatcaatgtccatcgcgtcggtgtcggtgtccattgcatcggaatcatctgttggcgcttcttgggtcttgctagcagcgcgcacagtagaaggtgtgacggggtctattgtcattctcttgctcgatgctctctttgcttttttagggactggagtgtactcctcctcgacctcgtcatcgtcatcgtcatcgtgcgtattgggtgttggtgttacatttccggggtcttctgattcagatgtatcttcaatgacataactccgacggggcgcagagcggcgcgaagccctgccctttacgactgaagccattttgtgcagatcagtgggatgtctgctgcatggagaggggcgatagtgttgtgcggaggttttgtcagttcaaagtgggttgtttacctcgtgcccaaacgggtaaagtgtccgctgttctgccacaacaagcccttcaccgccatgtcccgctgtaatttaccgtacggtaattactcctccgcggagcttcatggggatcagcttgggaattgttcacacaaaccatcacttctctcattatgcccagcatggctccatgggagagcttcgaccaagccttctcatttaataagaaatattcatatgagccaaaggtttttgaccagattctatccaaccggcgctcgttggaccagctctttgccgatcgactcttgggactcgtcggcatccaaggaggtattgtgacttgaagctctacgcttgaagcctcgggctaatcaattacctctctatagtggtcaagatctacccgccgaggaccaactcagatctccgaacactgttcggccacatcgtttcctcggacctcgatatccatcacaaacagtccttgatctattacatcctgaaggactgccgcactgcgccagaagcttcgtctcagtttgcgcaacaatgccacctgccagagaagtaccgtttcttcatcgaaggtctttggcatttggatcgactcgatttcagggtgagttgtgaaccatcttgagggcggtcatcttctgacaattccatgatataatagcgcgcagtggagcatctgactgaaccctcgctcattcctacctttcccgatgagattctctacgttcttaccctcacaaagcttcccaagcatgatgacagcctcgcaatcgcctactacctcactgcggctcctcctcttgcaagcacaaagatccgcaaagctttcttcgatacactcgcccgagcaaacctcaccgaggcattctacttcacgcgcaaatacgacgacactcttcgtcagagcttttttgagcagttggtggaatttgttcacaaggccacccctggccaaaccagaagtagacgtgcgatggaactcgtcggtcttccacttgatgaagatgaagaacagtggtttgagcacgtattactgcagggcaacgctagtacccttcctggagctaaggatactgtgatgatgcgacgccttgcaactgggcgaactgggcaactcaacccggagcttgaatccttgggtggcaaaaaggtcgatgggttgaattgggatgaccttcgggggagcatacgacacacgtagatgatatacccaaccagtgatctatactggattcaatgtttattggttactcaaaaatgaaatagcaatcagctttaatagttttaatggctctgaatgattttctaatggtattttgttttctgtcggttctgtgctaatatatacaactctttgttgatgagattgcatccactatatgagctggattgaacttctatatctcaactccttttaatctcattccgaggcaaagaataaagcaataaaaatccaatctcatactctcaaacattaaagaatcgtgctatacaagagtgctgtgagtattttgtaggcgttccgataagatacggaccaattccgcgaaaagtcctaaccacaggagttcagtgtttttctcttcgcgacaaccaaaccctattcttgattttctctcaaattgcttgatcacatatcgaaggatacggattaatccgagagaagccgttgagatacaggccttgctttggaggggagcagttgagcaaccaccgaaaccgcgaagatggtggtatgcaacttttttcagcagggtcgctgcaagtttggaggtatgaatctcttgtgtgtagagaaatcaaggcactaatatatctgaagatcgctgcaagtttgagcaccctggcaaaccgactgctggtccatcggggaatcgattcggggctttatcaggaggatttggaggtacgttcaattggattgttcttattcagcgttgctcgatgcggagagtccatttattggacatatattgtgtcgtgagattgattgttcgatctcgatgttcatttgttccccccatctctttctcttgctcttacccttctacccctgctgggcttaccccaaactccttcgagtccgaagtgcaacgaatgtttccctgttcaaaactatgatcaatcctgtgaaccacatgcccccccttcgggctagttttcttccaaaccctaacgacaaaattacggcaggtcaaaaccagactcaacaagtagccgagtaagtcgcatccccagcgccttcagtggattcaaactgacaacaggcagcccagtagtgaaggcaagcgaaatcaagcaagatttgaccgctggccagggccgtccggaatggatcttctccgcatatgcgccccacagagatgttgcgcgccagctgttcggcggagctcaccgcgaacgcagcatggaagagatgcgcttgcgccattatgaattagcagcagccggtaacctgaatgaagcggtccaagaagcctcgtctctgtggcaagaatgcgtgcaacagatggaaatctcactgaatgacctgaatggtgccgtcaaatatatcgttgacggcaagaatgaacatcctaatcgactggacattatcgagggaaagacccagactgttaaccaagctccagcaccatttggccaaccctctccattcggccaggccgcgcctacacccagcattggtcctgcacctggagcgttcggtgctccttcctcgacatttggccagccatcaggagttgggcagtcagtcggattcggtagggcttcagcaccagcgcaaccgtctggcttcggacagaattctgccttgggtagctcagccttcggccaaacctccatcttgggaggtcagtctgctttcggcaaaacacctttcggccagccagctcttgctcagccaggagttaacccaagcccattcggtaagccgtcagcgctgggaggcgcggccccattcggggctccatctgccgcttcacctttcacccaagtagctcagaaccagcctgctggtggtgggtttggccagagcgccggacaacctgctccgtcgcctttcggtccaaccgctggacaatctggcccgtctccatttggccagccagctgccaacacgagcccatttggtcaaccctcagccccggcaggcgctgctccattcggtcaaccctcagccccgacaggcactacgccattcggccaaccgtcagctccggcagccgccgccccatttggtgttccatctgccccttctcccttcactcaggtaccccagaatcagcctgctgcgggtgggtttggccagagtgctgtacaacctgctccgtctcccttcggccagcctgcagttcaaggcgtgccggtgcagagtaccaacgccggccctcgtgcatacatcaaaatcgaaaatcctcaagacctcaaccctcttccacaactggagggcgaaactcgacataacccatccactaaacaactagtgatgtggaagggccgccctgtcaagtatatcaacgagcatccgtgctaccttcacccgcaagacaacatcacctttgtccggatcaacttccctaacgggccacctgatgctgctggtttgaaagacgcacacggaaagcccgaggaatacacaccagaagtcgttgaggcatatcagtttttccttcagaatggctacttcaaggacggcaacattcccgcagtacctcccaagcaggagtggctcagtttcgacttttaatccccggagagagcattttcttgtccttcattttattgttattcctatcacgcgtctcatgggttgagatgacgtttaagcaacatgttccgggcgtgcggaacattgggactggcgcttaggagctcaacaatcaatttatgcatgtagcaattcgaagtgctttaatttcactttcaacgcacaaatttacggtctaggaccactaatgagactctttctttgtttcaagatgtttccattttttattttttaaattccaggttcgaacggaatcccccgcagcgcgaaacaagtcatgcgggccagaactagctccaaagtcgtgccgtgcactccaaattggccagtccacgatccctccccgaggcaagcccagcctagcgcatttatgcggcaatggtgacctcaacctcaacaccggcctcgatgttgatgatgatctgcttgacggtctcggtgggggcgagaagacttaagtagaatgtcagtaactgcatctgctatagcacggcgatactgccacaactgaatgggcgggaaatactcactcgatgagacgcttgtggatgcgcatctcgaacttgtcccaggtcttggaaccctcaccgttgggggtcttacgggtggagatctggagggtcttggtgggaagacggacggggcccttaacctggagggacttggagcgggcacggtcgatcagctcctggcagaccttctcgagggaggcaaccttgcgggaggtgagggtgatgcggatcttgtggaccttctgtagagcggagaagcaattagtacatagtttgcactggcgaggtctatggacacattgcacaaagcgacagctacatcagggtgtagcagcgattgcgacagtgaccattggatcaggaacaacgtacagggccctcgccgaaatccttctcgggcttctggaaagacatcttgaatttgtatggactgaaacgggttagtaagtcgattagggaatttcaagagcagaaaaaagggagcgcgcacaatttaaaaggcgattgccgtcaagacctgaactactaggctcggtaaagtgatgatggctgttggagtgatgtggatcgagaattccatatccaaaatgttcagtgcgaaagtcttggcgcttcggctatcgcacgctaaacccctttaggtcccctttcagtagttgcttatgtcatcaccaaaagaggacaagagactgccaagtgatggcattcgaggtgatgatcagggctgacaggtggctacgcgtttttcctttgttcttgcttttctcccccttgtattactctcatattcccagtcataaccaccttagatcgccccaatggcggagtttccggtgctggctccagtgccatcccccgcagtgcggaggacaatcccatcaaatgactgggaatcttgtctagatgcatggatggccctgttggggattcgcctgaatgcatcagaccaacaatttaaggttgtagcagctgaagatccatcaatacccccattcctgggatcttactaccaatatacggctgcgggggattctagtctacaaagtggacctaaagctcgacagcttcggaagctgtgctttctggcgacaagaagatacatactcgatctctccaatccaccagatggaattttggactggaggcttctcggcaatctatgttgctgttacccttctagcgcggccctgaagacgtcattatcaagtgcctgggatctgcaccagggcaagatcacttccagtatggagagagcaaaagcagttgtgattaagaacctctcttcggccaactcatcgtcaaaccctgaagtaatttctgacatccgccgtctgaccatccttgcttcagtgctgccagcgtgtggccaggagctcatggcaggctccgacttcctggatacgatatcggaagcctaccaggcaaaaggtgcccgggaggagtttcgtaagattctcgttgctaatatctacgtcgggctcgtttccttattgaaggagccagtcaatttgtcttcgttattggatcagctgttcagcctcaaagccgctgctcgagtgggagcgccaaaaatgaagagggaagcaactctactttctgatctcatctgcagctcggacttgcttattcggctggacaagtatctgagcattcacccccagaaacggggacaagatcttcttgccagcttgcgcacctatcaggtggaatcgaagtcactacaccatcggtatcaaagacgcaagaaagtggacaaaggaaaagaagtatcctcgcatccgatcgtttcaggggaacttcacgcacacaagatgtcactagtcactcaagtacaagacctcttccctgatcttggctcgggctttgttgtacggctactggactgctacaatgacaacccggaaaccatcgtcgcccacctcctcgacgactcacttcctgttgagctccagtctctagatcgatctgagcaactacctcccacagcagaacctcaccatagccatatgtcaccccacccaacaccacccgaatcgcctacgttggcaccactaccagcccgcaagaatatcttcgacgaagacgtggacatcgccgaactaagccgctctggcgaggcgcaaggaaaattgtacttcggccgcgccgacccagaccaaacagccgacataatcctctcagaccacagcaaacacgccgcaaacaaagcagcgatcctctccgcgctcgcaacattcgactcagacgacgacgagcgcgacgacacctacgacacagccgacgtaggcggcgccatcgacggagccacaggtggggcagacggcgaagccgatccagccgagcgcaaccgccgtgcagccgataccgaaacaattctcttccgaacatacaagtccaatccagggctcttcgcccgcgactcggcgacccgccgctcccagccgcgcggatcgttgaagcgcgagaccgaaatgactgacgaggctatcgagggctgggctctcatgctaacgcgtgatcccaagcgtctcgcgaaactcgaagaccggctggcgatggatgctggcgcgttggctggtgctggatcacttaaccagcctgagttgcgtcctacgtcttacaggaggccacagcctcgtgagaatggagacgagggttctgatgagggcgagtcttctggccatgctggttcgcggggtggtagaggaggtggtggccgtggtggtcgggcgcggggtggcggcggtcgtggcggtcgtggccgtggtggtggtccttcgtctggtggccaagggcagccagatactacggtgtcgagacagaggaaggaagagaataagagtagtcgggcgaatcataaccgccgacagcagcacgcgaaaaagatggcgcgtggcggtgggttgcctggctaatcacacgaagggatcaagctggcttgtatggatgcaatgcggcataaccgccttggtcattctctatttttgatatctagtaatgactgtgcatgtaatttacataacatctgttgggcttctatagaagagccacgacgcattgaaacagaacgcattcaagtaattcattaatatacctcaacaaatatagaatgcggtatagacagtcatcataacatgttcgcacagggaactcacttggccagcaaggaactgacgcttcgtatcagtggtgatctgagaaggctccgccttcggtaatggacttgcggcactcctccatgaggcggacctgtttcgcgacgtcaccaagccggctgataacctccttgttaccatcatagaaggtaaagatagcataggggataccagtatcgcggcagaactcgatgacaaacttctgcgtacgacgtaggttgtgacgcggaatccgcgggtagagatggtgaatggcttggaattgcaagccaccgtggaagaaatccagccatgttgggcagtcgacgtccatagtggtacggagcatcttctgcgcgaaggactcaccgactcctaggtcggcggttgacatagcgaagtgggataaggtgatttgaacgtgtagtggtgaggaaacaatatgtgagacgaggaggaagatgatgcggctgcttgcatcgggaagcgtcttgtacatcacaccgtagccaaaccaggtccaaaagaagacctgtccgaccagctcaaaccaaacatgccaccaagcagggcctcttctaggagcttggcccttgagtaggtactcccaactcaagacatacagattgaaccgagcgagcatcataatagggtagtaagagtagttctggaatttgagcagaaaccgagccggggcatcgaaagtcatgattcgatcgtaataggtactccgtaggctcgtgaggaagcggtgcgagatagcgaagaatgggatatgctcgatatccgggtcatgctctggctcattggtcacgatgtgatgaacgttgtggcttcgtttccaccacccgagacttaatcctccgagatagtctgcgatgaatattccaataagggtatccacatggaaattgtgtgtaatgcccatatgaccagcatcatgggcggtgaaaacaagctgatgccagaaacagccgaggaagaatgccgaggtcgcccaccatcccatgcggaggaacatataggaaagaccggcaaaaagggtataccgacaacattcaacgaagtaacaagagtagtcgcagtcgtaaagtccctcggccttgatacgctcgttcagttcgcggtattttcgtttgatctcttcctgacttgcggtatccaaggaggggtatttggcagtgtccaagacgatttcctcccgtgttctcgcatccaagaaggcaggcttggcttgaggttggtcggtcaaagcagatccggccgctttccgttgacgaactgtggatttcgagtcgaccgcatcgaatatcggcgagggaggaactgatccatcttggctggagccactggagcattcttgtgctgttgaatcctcatcactcgcgcacgtgtcttcggcataagcacggaacgtgccgccctggatcgggggtcggaaattgatccatgtcccttcaattcgtccaatctggtacgagtgcatgcgcttgcgggcttcttcggagtgtagcctatacgaggccggtgtcaattagactgatcaaaggtggtggtgtttgccgttccaaaacatacgcgttgatctcatctgtcgcatccctgcccaccatgtgcttgattggcttctcccctccgggatgatatctgatgaatgggtctaccttcaggacacggccctcgaagattatgacatgcttgccctcagctatcaggccttcaatatatcgtcgagtcaagagggtatccttccgggacggtcgggatgcggtcttctccatagtatgcggtgcggtgagaggatggatgtgtgtagggtcagataacatggggttacagtgacattgctgagagtcgaactaagcaactcaccaaaagcatgcaaaatgcaaataaacaaaggaaacaagaatgagattgaaaaaaggcagaaacattccaagggctatggggcggaggtggataacagcggggacccgatcagcgtgcgtgattgtcacaccttcacattaccaacataccgaggcacgtaactttttgacatggcagtgagtctcgaaataaattggtgttggctacattgctctaatcattctatacctatagcaatcaatttcctccttgactgagcaatggcttcattgggaccaggtcaatatgattcatgtttcatctcgtggcatgatcccgctgactcgggtatataggatcatacaactcgcgtggaaatagaacaacttcgggactctaacgccactgatgagctggaaaagcgccttcgaaatcgtacgtccttctatgttgatcctcggcgcgtatctaattcgtgtatacatctaggcattgagttcggaacagctggtctccgaggccgcatggccgcggggttctcctgcatgaactcgttgatagtcatacaagcctcccaggggctggccaagttcgttcgagacaagcgtcctgagatcgcttcgaagggcgtggtcattggacatgatgcgcgtcacaattctgcgaaattcgctgcactcgcagctaacgctttcgtcgcacaacgcatccctgtttggtttttcaatgtggaaggaccaacacccatggtagcgttcggcgtgaaccatttcggtacggccgcaggtattatggtgacggcgagccacgtaggtctaccccgaaactacttttatcgatggattggctaatcggctcgaagaatccaccccaggacaatggtatgttacccatttctgatgctgtaaaataattgctgactgttttataggctacaaagtgtaagaactatgaatgtatatcatggagactgctgacaagatctgccttgtagctactcgagcaatggtgcccagatcaaccgacccgaagacggcgagatagcacagtcaattcaagaaaatctcgagccatggccgaccgcatgggcggaattacagccaggcgaattcctgcacgcggattcctatcagaaattgctgcctcactacagtagccgagtcgcagagttcacggtacgttgtgggctgtgcttcaggagatcaatctaacgagtttactctagaaatctacggtgaccaattggcagcccccaagaccgttcgtttatacacctctgcacggcgtcggaggtttggttcttccaactttgtgtcactcacttggaatcaatgactttgtatccgttgctgcccaggaaaagccagatcctgaattccccactgtgaagttccccaatcctgaagaggctggagctttggatcttgctatcgagactgccgaccgagaaggaaagaccttgatcatcgcaaatgaccccgatgccgaccgtttcgccgtggcggagaaagtggagtgagcctcgatttctgactaccgtcaattgatctgaactaacatgtttccagtgggaaatggcacactctaactggaaatcacgtcggtgtacttctagcgtcccatatcttggattcgttcgatgccagcaaagattggtcccacatcgcggtgttgactacaacggtgtcgagcgggatgcttggaaagatggcagctgcaaagggaattcacttcgcagaaaccctgactgggttcaagtggatggctaatatcgcccgggacttggagaaagagggaaagaccattccttttgcatacgaggaggcactgggatacatgttcccagctgtctgttatgacaaagacggcattacagcagctacagtcttccttgcagcggaggcgaaatggagagcccagggattgactgcatatgcgaaactgcagcaattgttcggcgaattcggccatcacgagaccttgaataactacttccgatcacccaatccacagctcacttcaacattgttccagggtatcagaggcagcccgggcctcgccaatatgcagtttggccccttcaagattttacgatggagggatttgacccagggctatgactccagcacccctgataacaagccggacttacctgaagatccaacaagccagatgattacgctgtggttggagggcggggtacgcttcacatttcgaggttcgggcacggagcccaaggtcaagtgtacgttttcccactctctttcgagcgaaccaattactgatatatggacacagtttatatcgagagttgtggagactctcgcgaagacgctgtcaaagcagtctgcgatgcattcctcacgattcggaaagaatgggtacagcgctttacgccctcgatgacatacagcaagcaactttcgacatcgtctggtaacattctgaccgttgaatgaagacgtgcgtcagatcaataattggctgagattctcgaatgaccggcaggttacctgatgtagccaaggcgcccgccgcgttcgcaatgcagagaaatgtggtcaatatattgtgaacgagtgtaaagatggcaattgaactactgtgactagagagatcgactgcctccctttcatatatgtacaaagggtcatagcgagtgtattctctaatttacttccctccgtgatgctgatattagcttcgaaggaactcctgtgtctaggggagctgagcgaaaggatttgaggcctatgcacaaattcttgactctcatctccgcgatcaccagcggaatgatctagagtggatcaagtcgggcaaatcaaaggcggcgtgcaagtgggcagtgactctcctggctcaatttctgctatcatctgcacctcagtgtcatccgcttgtgcttcagtgccatcgggaccggcagtacagaggtcgattgcaaaagttctgtcacactcattttcacggtagtataaatttactcctaatacaatgaggttgtttcaaactgctgtttcgattccgttccaatttgattaaatacaacatacattatgtagtttaataaagcaaccaactaccttccgccttctaaagcaaaaataaagttgatacagaacttttgaagtcgacctccggccatcacgacaaccggcctaatcgtttattaccgccttggttatgtggggctcactgcgtactccgtatacttcgaagtatgaagctattcagagaccacctgatctgtcaatatgaaacaatttaaattattggaatcatgaatggaattgctgctcgtaccccccaggatgacaccggcctaaattttcagtaccgttttcctaagttggttgagtacctagatctatataccagtcgaacaatccgagggcctttcagccttcgtgaatttgtccgagaactccgggagaatgagagccccttgaatattgttggtgctgtacatgtcgccgaactgaatcccttcttttgattcatatcgctttcgtgagtaggctctgtagatcgagccggacatttcgtagactacggtggttctttggattgcgaagtcatcttcaggacctccaaaatcttcggagtattcgagaatatacattttgaagggggccacgcatcaagcaagagaaaaaaaaagcaaggtcgattcaggtaggtaaccggtctgggagtcacaagatgaagcgggtgccgacctagttgcgattaaaagggctgtttgcactttctcgtcagccaaggcttgtgagaggagtcaggaggagcatccaaattgggattcctccttcaaggccaaatatatctctcgatcttgggcgtatcctcaagtctctttattcatacatcaacatgcatcatcatatgtatcgacagagcaaggcgaggaagaatattatcccacaatgccatcttacagaaacccaacaaaacaccgactgctatgatcatcatcacctgtgtcacgcccaacaagctacgccctgctcaagagaccatcacctccatctaaacaacaccgatattgataccgtcaaacatcgggcatatcacttacgtcaagccccaagtaccaaagagacaattcattgttatttttgtcctaacttccaaggtcagggtcctcgcctcagaatgtaagactggatttgcacttgtgttgcgtcggtatttcttcacctctgaacgaattgcaggaacaacgtcgattccgacccccttgtacagcaccatgagatctgccataaccgacataaaagccaacatatccacccgcaatcccggtctcgatcttccgagtcgagtgaagacgaagaacaccgctaccacaccgagcattaccatactcaagggatccagtccaatgagcgacaacatcatccacctacagtcaagcacgtccactcaaaaagttcgaatagcatgtttgaccatggccatcaccacgctgcaacaccagcacaaagtacttgtgctcatgctaccgtgtttaattcacatgatgacggatgcggtagcaatatgaaagccgttagattcgaagaagatgacaggcctgagactcaccattctgattgtcccatacatggtaccccgtcccatggagaagaccggtatggtcctcatcgcaattcccgtcaataccagtcccaatgtcgagaatcgagaacttacaggtgggtttggggccctcctttacccgtggtggcccctcgacgtgaaaagacttattatgcggagagatattgagaaatcgtcatagataaattgaatgcgtatcgaatataaagtcacattctacaaatttcagcttccattcttgtacctactcacagcaacgtaaattcccccgtctgatgacttcacttttgttcgagcacgccacctttgtcttttggttcggaatggaacacataaaaagaaggggaaacttaatgaagcagctcacgaccctgttatatctcctcgcctgttggcctttcccaaagccaaagtctagctgcctatttgtgtgggcattttcgcaaatatttccaccaggctaggtctgttgggcgactttaacgcaatgtaggtacgtatggctccatgagattccatgcggggatccctgcagatagaggattacatgaaaggagtcgggctcgatttccaggacaaataataaggaatacctccacaaactctggatgagtgtgcagtatttccacataaccctcaactaataggtatgacagcgaggcgacatggaaacatcatacatcgtagctacgagagatggaaatatatcgccatgagaagattccagagagcaaacaggcaggaagatctcaggcagcaatgctgccaatagcaacccatgcggggtctgccagctcatcatcgcatacaaagctgaatgccacccatactatcgataacatgtcttgttaactcggctggaattatttaatatctgactagcgatggaatgctgcaaattatgtgatcggtcttttagtgaccggcaagcttttcaacaacatatgcgagatgctccggtacatactttgacatttcgatgcgacccctgcaatcgtacttttgtcagccaaagcgccctggaccaacatctccgagactcgcctgtgcatatcatcacatatgactgtgagccttgtagcaggtcttttgtcagtcaaagtgccttggaccaacatgttcaaaattcaccggcacatgcagtatcattcaactgtgagctttgtaatagatcctttggcagccaagatgccctggatcaacatatccagtattcaaaagcacacatcgcgccgaccagcaccccgctggacaagttcttccgatcctttccgagcttcagatataatccaaaattacccccttcggaatcatatgcccagctcagggagttctgtggctgggaaaaagagaatccagatggggaaaaggcctggaagaaatatcaatctgctctcgaagctgaggttaagatgtggttcggagctgaggatgaccttgacgcctggcattctctttgtcgagctatcggaatcgagcctttgcctgaaacctgtaagcaagctgtgagggtaagtacttatcacgtctgtatatctgcatgtttttttatgattcaaaacggagatctacaagtatttattattgagattgactaataaattgatttaggtcatccgaggtgtgttcgtcaatatcatcgatttgatcgactgggctcgaagtggaagcacaaccaatcgagtgcaaaggttctcgagcttagaacagctacggaaatataccaaacaaacgggaaaggtattccacaatcggcttgacgaagatgatgatggaaatgttgtccttcggcatctgcttcggtttcttttcaatacaaatcgtcgttattactattgatgcattgcagaaggaggctgggtaaaatggtcaatttgtttcattctcactgatgtagataggagatcatctgcaatatatgggaaatgaaagctcgagagacaaaaggacctcaagtgaattcctagtggaccttgggaactcgtcaacttgattaaaaagatcagaacttaacttagaagtgtaactcttgaacattgcccgatctggtgcgaatcaagatgccgattcatttgcagcaagggagttccctgattataacttgagaaaattaaagagaatgacaatatgtgagaaagcattgaagctttatagaaatgccattatttcttcatctttttatatcccgctttcacattgtcattactcgtccaagatgagtttcccgtctcttttggcagcatcagcatcttaggctagcactttctttgcgccttcacaagccatatatgataaagtacgaccaaacattgatcggctttttgggtgctgattctttatctagttttggtactatttttggtactatatgattccgggtttcaattagaattaagtgaaatgtggcatacttataatagtaacatacgtataacaacagtaataacacataactagcagcttccagatcgaagcacatacaaatgacaaccctggaatgatattggaatcaatccatctaatgaatgagggatgacttgttctttccacacaatccaagaaggctcagttcatataatacaaaagacctttccaattgtatgaacatggcccctagagtagctttccttagtgccgcctgtgggcacgtcttgcatgtctcggtagcgtggccagttcggcaagcgccgtgccctgaaagcgaatttgctggacatatcttggttctcttcggtgctcgttgatatcggagtcgtcagatgatgacaactctagtacaggctggaatgcggactcgtgtcgatgccccgagggatgaagttgggtcctacgcaatagatcttctgtttgcacctgcgcagttggagccataccaatagcacttcgtcgagattgaccgacagcagaagggtatcgagtacgatccatcgccctattggtaagaatggtgctacgccagtcgtttcctggcgtttcggggaaaacatgacttctatccaagagtctggaggggactctttgttggatcaccatgcccgtatgaccgtggttacgtgcacatatatctgcgtagttctcactggttgtgaaataagccgcagctgccggtgtcgatgaaggtccccggcacccccggtaatgacctcatccggatttcccgttcgaatgtactcttcagcccgctctcgggcagaacctcggtagattacacgggatggtctggacctcatatagtcagcactatttaagtgaggtatcggaggtagtttcacgtacggcccattagccgtagcgggatatgccgagctggtttcacgaactgtttcaggaccgtaaggaccaatgatgagtctcgactcgctcgattgccatgatccatagggggtatcatagtaacttatgaaagaatagatgagtaccgtttgaaataatatagatgatggcatgatttactatagcacagtgcgggttcgtgtgtcatatcgtggctgtccgtccaagatccgtcgatgagacatgtgggcaattctctggaagtgcaaagatatcagctcttacactgggttatgccaagaaagggctataggagattcgatacgagagaaagacaaggaggatgtcgaagaccttgagcaatagaaagctataaggattgaatcaataacggcatcccttagtttaattattatatgtcttctacaaccatcccagaagcaaagggaggagaggggtcagacagacgccactgaaatcgaaaacagagcgatctaatttaggtgctttttaacgccagcttgtatttcagtatgtgtttcaacgggtattagttgagattactgaaagcaatactgctagactgacacttctactgtgctgattgtataattgaaactagccctgcatgctccaagcgctctcaagttgtgccagagctctccattgggaacagtggcgtttggacatgaggcgagtcaacctgcgcggatcattatatttccggctggcgtatgcggcaacatcctaaaactcaaatctgacaggcgtgtgtttccgattatcttgattcctctcttcgccagccaagcctttttgcagaatgtccacagcatgctggacatgccgcaatcgcactatccgatgtgactcaagcagcattccttgcgtcaagtgcgagaaagctggactagaatgctttgaacaaagaccgctacgatgggtgaaaggtgtagcaattcggggtaaaatgcgtggacatatatttggagaggaccgcaaagcttctgatgaaaatccacggacgcaactagaacagaaacaagtcatacattcgcgcacgaagtctttcacaacaaatattacaccctcgttcgccttgcaagatccttgcatacacaatctcgaccggtcatcgagattctatcttgattattgtgggttcatggcgagctaaatggtcccgtgtgtgcactaatgtcagacaagataatttacgcgtcgccaagttgttcattctatatgacagtgagagcaatccatttagaaggttgctcacttatgcgatggaaaattcaaccttgcgaaagactatagttgctgttgctgcaagacacttcgctaatgcaggccagtcatttgatcaggtcaatgatggcttgtcgcctcggtttatcaatgccaatttggatgcattccatttcaaacagcaagccatcaaggcattatcattgtcattatcccatccagagccttctcaaaaggacgcgataatgccagcaattctcctcctaattttccttgatctcctcgagtccggcatcgaaggttggaaatatcatctccgtggtgcagaaggcctggtcaatctttctcactcgatgctggagcctagtgatagtaaatctatcaacggcaaccctggagagacggtagaggagacaaggcgattcatcacccgacagttttcgctgtatgattccttcttccctatggtttgtagtgtgaggtcgctgacaatagtagtgtctcaacctttggaggtgcactctcaggttcaaagtcgagtcctgaattttgtatgaactttgacgaaagcaggcaccatgaatccattattcgaagctttctgggatgtcctgtattccttcttagagctatccgttatttctcgaaccaaagacacgtgatcaagagcttagacatgcatgatgacctctcgattcacgagcatgtacaaaatactttgagtatgcttgagctgacagcaaatttcgattgtctggaatgggcgtcaaactccgtggaatcaagcgtttcctcagcagcggagcttcaaaagctttctttgctatctcaagcatacaaaactgccaccattctctatggaaatcgagtgcttcgtgctttcaagacatcaaccgggccgatagcatctgacaatgaggagttggtgttgcgattacttgacgtgattgagtctctccaatgcgacccggctttgttcaagtgcctattgtggccaaccttcattgccggtctcgaatgccagactcatagtgagcaaaacctggtcattggatttctgaagatgctttggaacctgaccagttgtttgaatgtgataaacgcttctaaaatggtgcacgacaattggaagcgaaagaatttcgatggcaatttggcgtcgggggaatctgaattatatgtaatagaacaaggctggctgcttatttgatctgttgtattgcttccatgcaatatttgcaatgaatacacacggaagccatcacagaaagccaaagggtcatcgggatggttgcaaagcaactcaatcctagtggactctacaaatatgtcagcatatctagcccaataaaatatcggcttagtacttcgtgggttggagattactgttagccattaaagaataaaatcttatttcattatgcccaaatattacaagtacagctttcaaaagtaggtcgaatatctcagccgtctatctggactagtgacgacaccgcataatttaatttgagcgccacatgccataacttcctattcaggcgactagggcttaccaatctaccacttaccctgcccaataaccacttttctcggatagtgtctgacatttggaagattttcccatagatgcgaaagaatgtgaacgacatgtgtcagtgcgcggaaatttgccccggatagccccacctggcataacttcctaatcgggtaagtatagttccactctcaatcgacttcagcaggtccgagaaatatcagctcacgaaagacaaattttctagtgaattatgctgacggggtgctttcaatctctgtaggaccgagcaaggattccatttcccgaatttgaattaataacggggtgaagtgagtaatatttaaaggccatatatcccctccgttttcattactcttttagtatcattcaacggactctcaaccactatcaatttccctctactttattcaaagcttaactcattcttccgactctttccattacactatgtgccaccaggaaattgacgccaatggctggaccagcatcgcggctgatgctggcgccatcttcggcgaccggccttttatcaataagccagactctctctctatcaccgatattaaatttccatttgatgatcctgtggtcgcgaagactttgaagtatgcaaagaaaaccctgcatcccggaaccttcaaccattcgatgagggtctacttctacggtatgttagatgttgcgcatagctctagtaataccaaacatcgcatctaacatctgcttagggatggccattaccaagcagcagttccccgagcgagctgctactctcaacccagcgacttgggccttgacatgtttgctgcacgatatcggcacggccgaggaaaacctgacggcaacccggatgtcttttgatctatatgggggcatcaaggccctctctgtccttaaggattttggcgccactgtagatcaggccgaggcagttgctgaggcaatcatccgacaccaggatatgggagtggatggaacgatcacatacattggtcaacttatccagttggccacgatttacgacaataccggtctccatccgcacgtcaagggttttgccgaaatgatccacgaaaccactcgcacgcagatcaatgaggcctatccgcgcctcaagtggtctacagtcttctccggcgtcattcgcaaggaggagaatatcaagccctggtgccattccactcatcttgtcaactttagcaatgagattgaggccaacaccctcatgaagcagtgggagtgagaaccgaggactcaattcttattgatttatatttgagctttcgggtcacagtggctgcacctactagacatgtaaactttcaaacgaattcacctccgaaaattgagatgcacgagttcaatttgatacatggatcatttatattacgttgtattaaacatcaataaccccccaaaagcgggttttgacgtagctatacagcttcgtgtccagatcaagaatgtcatcattccgaacatagacttttccacctcaaaactccttgaggaacttctcgtaagtggggtacagattttctgcctttcataactaacgtcgatactagtttgataagagaaaatggatatttccctgatacggctgcgttgcgtagcctggtctgggataagaagtcaaaaaccctgtacatctaagcacacagtctttattttcaacgtgactacgcaagctagtactaatgatctctagttacttcgtcggataagacgggcaaacctaaagagatatttcccgacgttatgtggatagcacactttaagctcgccataccaaactcgaagaaatggctcaaaaatgaatgagatcaagatacctcaggatggaaatggtagtccgcgcagtaaattgttctaatcccttttcttatttcagttaggtaccagaaaatgcattcagaattttccctagtggaataagattcgcaatttgggggtgattctaggaagccttagaagttgagagacattctccgaaaataatggttgatctcctcaagcaccctaagttttatgcgctggcgtgatgcacaaaggtctctcgaccaaacaacatcgataagcgccgcccattccaagcaacgaacagttcatctagcgccgaccgtcccagtaaggagatttacaactcatgtggtacgtcagccaaatataagccgcatcttctaaataatcttagatcaatcccaggcgatgggagggattttatagatccatgcacggtgataagggtaaagagcgctaaaccgaaagggttagggctaaacctaagagcgtgatatacgatagatggaacaacctatccaatgaaaactaataaacatgcaaacagtaagcgagcaagcaaacatgaagcatatgataacgatctgtagtggatcgtcatataacccgcgaaaagacccatctagtctctagatgctgaaagactggcaatggcatttatggttgccattggccttcgaagaagaacgtggcgtggtcgaatgcagagagaaataataactgtcaagtggttgaataaacaaattttgaagaacttttgtataagttgaagatcaaaggaagaatttcggttccgaagtgagaatttaagcggtgcgtagatcggtgtcctgcttattcgaaagggggataatctagcttgttgaatcttgttgtggttgtcgtacacacgcgaagttgatcaataattgtattattatgtacgttggaatgatggtgcgaaggagctggcgagattgagaagttgacgttgaatctcggaaggtgatcttgcacgaatagcagcatccatgtgttgtacttagatgagcggtaaacttctaagggaagtattgaaatgttttggcggtatggaaatgaagaagtgggtttggtgttgaacttggacctgatatgtcttgacaagcttaaatatcaactagagctgctggatctcgctatgaggttgacgaaagtagtagcaaattcagcgcgaagctctgtacaattttgttggtattggtgatttattttgacgaagatcaagaggaggtagcgaggttcaaattttgcactggaaccgttgcctggaagtttcaaaaagaagaagaaaagtggattcagaattcaggattcaggaaagaagagaaaaaatcaggattctggatatggaggatctgagcagtctctcgcgcatggctggctgtaacgtctcggagcagtccaatctctagctcacaacctaaggtctgctgccggactgtccaaaagagaaaagatgcttcgagtgagtgagagcgtactcgcaatgagacctctgtgcagtgtacgaaagcgtgccagtacccaaaccacagggctgcgtagctgaggatcttaattgtcatatgcttacatttttgtgagcagtgggctactactgcgttattgggcggcagtttggtatatatgtcctcctttctgttgcttttatcacccagaacccgtgcatctttccacctgggcaagtatactcatttgcagtcgtgacttccaccctactctacgtctctgggacaaccagcacctggggacttgccctaaccagagagttgtaaagccacttgtgcctgcctatgatgaattgaaaggcttttgttaatttccctgtctgtctcccctcttctcttcttcttttcctcaactttctatactttctgcttaagttacagaaaaaacgacttatataatttgtttaactcctcctgcctcacgacaccgacgccgaaccctgaacccctctgtcgtaccagaaatggacgactctttgtaagtaaatcaaagatggccgcaagcaaactgctaacatctcatacagtccgcagaccgactgcgaagcgcggaccgaccgcgaagctaggtccccctctcccccctcatctgctaactatagtacagataccaccacctccccggtaaagcccgcggggtccatggggttctttgctgcagttggtgattcgtcgtcgtctgcgccgagttcgtcaagtcccacttccgacggcagcttcgctccgcgagttgacggacttacccaggtcattacggctatcggtctaacctttggacgtgaatcggggtcacccgatgagctatcctttggagatgatggcgggccggatcgaggggcggaagtgagtgttgcagcagaaacggtcaggcaagtccaattccttctgcggtatggtgattatgctggcatggtgtggaatgttttacgtaagatctcgcgactttccaacacgcctctgccagacaccgttgtcgcatttgatgccgaactcgacattggtgaagaagaccaggccgtcgaagaattgggagggccccctggggcctggcaaattctgaggcgactggtcgatcttctcaacaacagggaggggattcaaatcgacgagtctatggcaaggtcggcaatcaaggcgtacgcgttgcggaacaagctctgccacagcagcaaccttcgagataagtgtcccccggatatcgcccgcgatgccggggattgcgccacgaccggctggaccagatgtacgtcaaagacggagaggcaaagcgactgaaccaaccacggccgggccgggcaggttcagatcctttaccttacgtgccaacgatggaaccgacttactcgccatcgcgccgttaacgaacccgtcctagcggcacacggaacagcgcccctttttgcattcacaacgaaattcaaaggtaagtaagaggtaggtcaaggtaagtatggtaagtagcccctcccccccagcgaagagctcgtaccttatcgtggtgctggggcctagtaatcctttatggatgaagctaagacgagctcatatacagtatgtatctagtaacaaatatacttcatccgtatttgatgagcatgcgatccctttacttcttataagaatcaccgtttcttgattactgttttcttcgtagactgtgtttcccagtattgatttcaatcaccatgtaacttcggttgacgcctatttctaacattcttttagctcccagaaagatgcaaccaaatgtgaaacacaatgtttcatagaccgaagttcaaatacagcagtctgtgtttgcctttgccgatgaagatccgaatcttctgaatattacactcataaaaacccgaaacttaagtttctcaagcatatctgttgtttgatgctctttgtgtgtgttgctacggcgggtaaggctcatttatattagcatttcatgttaggcatttcattcacatagtggaaaggggacccgatctcaaaaaacagcaagtcaaatgatcttgaacaacagatcaagttatgtattgcctacgagccttcgatgctcgggtcattgcactgattctccgatgccacctagccatgtccgacggatctcgagtctggtcagtaatgtgcctggtggtgtgtcaagtaatagatctatgtacaaaaaagtgtgaccagagaaagtagtagaaggtagctcaccacaagcacaagctcttgtgacgtgccaggtcttccaaagataaaagggtgcattcaatacagaataactaagatggggagagaaagaagaagcaagttgcaaagtgggaggcagcctgttgatatagctgtccctttgcgaacattgcaaacctcgaacatctggcttagatatccagcaaacaatatatctaatgcaaatagtaagcaagcaagcaaacgagcgcgcaagcaaacatgaagcatatgatagcgacctgtagtggatcgtgacaactcttggtaaagagacaacagatacaggtcgttctcgccggtagacggggcggcagcgggatgtgaaaggacttggtgactgggaggaaatgtttcaagctgtagccttgaaaggctcatgggctcagttttcataggctgcagactccggatctcacagctcataactcaacctccagcttatctcgttcatgtcgctttagctcggcagaacgcatggcctgcaataccgtatagtggtagaccggaatgattaggcatggaccggggggataaccgtgatcacgaatgtctggacgatggcggctccgaaacggcacaggctgccccgggaatctttcatcaaaccagtcctttatcacaccgctccgcgttagtcctactgtttgctctcgaagtagagggtagggatagaaagtattgaatgtgatgtttttgccgttcggtatgagtttcaaagtgtcgacgaccctgacaacacagtcccacagctctaactcttcgctggggcacagtaaacagaagtagttgacgtgaatccacggcccacatttctggaatctccagcttggaaaatttcggacaagtcgaagaacatcatcaaggtagctcaatcccatgaatttgacccccattagttttcccgcaccctttgccgccttcacgatagcgtggaattctggtattcttcctccttcaggcgagcaacgaattacgatagtaagagagaggacgcgacgttcgtatagaatatgagttgtctcctcgttgaggtatcgattgcaagaaaggatggatagaccacagggtgtgctggacgtgttccacaagaaatcatcgaagagacagttccagatctggaagcgtagctctggtggtagctttgaaaattcgccgagtcgggcgaaaagtggaggtttggactcctctcgggagcaatcttggttcatcttgcttggtgtttgacttgaaatgaggtgatgacgaagaaagaagatgaaagcaaatagagatgagacttatccatggatcgatgagttccgacgcccagctctgactggcccgatgccgaattaggctgtactagtgatctcgacggcctaaggcctccaaatagtcgttgcagagtgattctgacttccaatgctacgcaaagccccctcttgcatattcatttcagtaccgccttcctaattaggtacatttccctgcctcaacaccccacatgcctttattgcggagcgaagcgaaacaagtataaatcagaaggtcttacgtacgtgtcacgtggccaagttttctctcaggggggctgaattatgacaaaagcaggggagttgatctagccgagggtcgctgtgaagccaataagccagtaagaggggggctttgcgcagcattaaagttagaatcagtcgcttcgctctgcaacgactatctggaggccctaggccgtcgagatcactagtacccccatatagtagcaagacagcaggtacctacaatttgtatgtaaaccactaacaaaattaagtcacttttatcaccacatctacttcatcgtcaacaactgctccaacaactgcttcaacaaacttcagaacttcaatatgtgctccaaaactgctccaaaattgctctatcgtcatcaggattaaaacatgtaggtatgagataaaatacgcatttctaattctttctaatcaaaatgtagggttttttgagtatgtaaacagcgcctgtgaattactgcctttttgggttagcgccccaatacgctccgctcctgatcacaaaatgagttagaacatgagctaccaaaatcaaataggagtgtccatgggcatgggtatatattggttgggagagttcttaagggaatattgctctataatcgtatgttatgtacgcacatattagaagggtctatagtgatacttgccttatgcttctcagtcatttagcgtcaacgatctgtctctcaactgtaccgttgcctcgaaggccttgtatgggccgagtccttttagggcatcgaggagtgacgctaggcagagcgctggatagttctataccgaagtattggactatttgttgtggttgtcaagttataatcaagtaaagtaaatagtcacgaagttacgaagtatgattgaagacgaatacataaactaaatatataagtgtctagatacatatatctgcgtttgggatagacgactagttagtggaacactagaatagttctattttgtgactgttggctaccggaaatccaggaaatagccatgccacctgctaggcacgtaatctgccaacttgctaaccagagaccaccagcacgagttcgcctgatttcccccattatccaaggagcagcccaggtagggcccaggtggccagcgcctcaaatatgacagacaagattctggcaatagcgatgtgcgtcgaactatagcctgccgacagtagccaagtgacagaactgtcaagcaaagcagataattgatcacgaagtacgcactcgcaagccgtgaaagctgtgccaagagaaatagttgacaaaggatggcgtatgcaagatggctgtatatgaagaacagcgtcggagaaacactcgcgaaatcgagatgaggccaattatcacatcttatagatgggacaatgagatctatgacctttttgtcaaacaagatgccaaggagcgccaaggagccaaggccagccatgcgggatattgagcttgtttcgaaccgtccctaatctactggatctgagcaaagggtcgaggtcaagtctacgttgatcgagctgtggcgcttgtactactctagatataattggcgtaggaggatgcatgcgattaccattatcagcagggtccatgggtgcacaaaccagccatatgggatatagaagaaaatgaaacgcccaatgtacgacagctagatatacatgaggtgaaaatggggaaataggagtcacatcgattgtgctttgccagtgcgtggaagagaaaatgggaacagacccactggccatatgagcgaaataaattagaaagtagaaactagaagttggaggctgagaggattctatccagaccccgttctctcgagcgctgcaggcgctccggggcaatacacttcggcagatgcaccaagtgcccccgctcgatccgtacgaagatcgcgtacagcagactggcaaggccaacagcaatcacactgataagggccggccacttgaactgttccggccgtgagaaaacgatcgtggagacataagagcaaatctcgaataggttctgccaagcagcttctatcgacgaaaaagagcctcgcgcctcggcttcaataccctgtaaagtcccatgaaagtcagggcctggctatatattgaaagaaggcattggcaaggccgtgaataactcacctcctgaataagaatctgtacacatagatcgaaccctcgcaagcctacccggctgagaattggatactctgaagagttacagcgatctatcatccctccctaatccatctcccccctctccctctcttccccctattcctatcatcttccttcctcttccttaaagtgtgctaaggcttatcagccaaaagaaattcctcgtcacttcgattattatgtttacaatctggatccttgaggtcactattacaatatcgggtagtgggttcttgagtatccgtggcttattagcctgacgcttctcattatctctatcatgcagacacaattgagttcccatttttttatcttactttgagttccagccaccaagcaaacttttttatcgtcagcactacgtattgcgcgtctcaattgggcctcggagggaagtaaggtgagttacgtgccttccagtgctgggagcacttggctaactccacccatctcagcagtttccctatcgaccagccatgactgtagtccatcacgacaacatggaaccttcatcagagcttattggctttgaggaagcgcctccgatcgagaatcctactatgccagttgctgatattccatggagccctccgcctattgatccattgccagaacttggggataccgagagagcaaagttgatcgacaaactaatagaaaaatcaaatgaaagtgaagcggactcaacatattgggcatgcctctggttgtccgatattgaatcccttcgagagattctccaggtggcggaatgctcccagacctatgcgtccctctccatgacaggcgcgaatactttcgccatgatcagggcttgtgagctacttccgtttttcatacccctttctaaccgacggaaggactgacattgaaactccttagggaaaacaaagccgaggatgatcgcagggctgcctgagacacaagggaagcgaaagttaggggaggagagcccgaagcgaaagttgaccgcaaaaacagctgtgagtcgtctaatttgcatggagtgaggaatgatctatgtactaataccttgactagtgtcttaagcgcgatgatttcagctgtgtgatcaccaatttcccccaggtagatgtggctcacatctacccactatccctgaagaaaagtcaatcatcgggaaacaataagaacactgacacgtacgacaagttctggaaaacgctatacatgttctggggcaaagaccaagtcgatcaatgggaagcccggttgacgggcccatgtggcacagagctttgcgagaatttgctttccttgtgccccaacgcccacaggctttggggggcttgttactttgccctccagccgctccatctgcgcgatgacggtaaggagttgatcacacgcttctactggcttcccgaggtcacgcgacagaaggttcaggtccaggccaaaccgagtatttcgcttcatcctcccgcagatttactcaatcttcgtgttgagaacactgatggatctgcgcacaagatgaattctggtgatctggtcattttccaaaccaaggatccagaaaacctaccattgccttcatgggatctcctccaaatgcaatggattctccatagaatcggtgcccttagtggagcagccaacgtccctatgaggccgtgggattgcgatagtgaggatgagggttccgacatggggctcgaagatgttttcgagccttaccaggatgaactttctgcgggtacggagtctgaagatactcttgaatcttgaacccgatgaagaagatacgcagttgccgccgattcttggccgtccgtctcgtttccagtcttccttcgagatcaacccaaatgcagacttccctcgccgacgatctccctccagtgagaagtctctacagaaaatagctattcttccttccgtcccgcatgctagaagctcccaaaacatcgcaccacataaccccacagacctagtgaaatccccgggtagaagtctcttatcattggacatgactcctaggaggtttgcttgtcgagggcaaaccatagcagtcgtaggataatgcttcttcgttttttttttctttcaaatttcacttcccttatttgaaagtcccatagcagcaacattttgaaattgaatctcattctggatgatctagctatcatccacactcaaaccccaaatatagacaagacaaattcggcgctgataaggatcgacctgatgatccatagtatccatctgatcatcagatgagaagcgatcaagaagaaatttttccctttcctcactcagttcatagccacgcgatcttatacaacatccgcattctagagtgcagtgtcccataccaagcgccccggctgaactatttgcacattgagcatcaagacaacatccacaatcacgaccacaacaaccgtttctagacttgcagtcttcaacaagaattggatgcatataccacaaaggattggatctccataactcaaattcccgttgtaagggcctggaattaccaatgatccagccacgggtataccaccaggctcgtgtcagcatccaattctcttggtagagtgtgctcgtctcgtcctcaaagcttggaacgccagtgccccagaaactcggattatggttttccttggttactggtgtctttgtgaagctgttatcttcaagcaagctaatatatatctttaaagctacaactagttcgagagataactcgaagcccacccgatgttgactgtatattccagcccgaagggctcgaatcgtgggagcaggactctcggtatgcgcccacgcctgggttctttcatagcccttacgacacacggtccacgtacagcccctcccctttgtatgcggtcgataatggcaataatgcggcaagccaatcatgaccggaaaatctcgaattacttcagttttttcagtaggatgaggattgtacttacaatgaagaaccgccaacctatatctattatctcatagagtggcgggtcaaggtcaataaccgaatcgtatcgaaggataccgatgaagacctcgtgttagctctaagagactactggcagcagttcttggaaaaggaactgtatgatctccttggatgtaaagttccccgtgaccgaagggtaagaggtgaggatacttccattgttatatccgtaagggatcgttcttaccaatcgctatgacaaaaccgatattaactagacaattatcgaccggcaactccagaagtagtcagttctgttttattaggacaaggagctgacattgaagataggtaatacagcagctcagattgacgagctggcggatgcaagaactgcttctagtatttagctagttggttggcttcccgctataatatcagactacctcaaaatttgatagttgtcgtgtcctatatggaaaaggccgagctctgaaatggaggttgtcacacgagtatcctgcgccagctagcacctttctggacaaaccgatccaaagttacgggatctatggtcatcgcgcaatcggaaaaatgaaagtcgcggttgtctgggtcgcccttagcaggaaaaatggattaggtaccttttctcccgcgccccattcggattctttgattgggatgaagaagagggctttttaaatcgatggtgacttaatgatcagattatgccagtcccaacagacatataggcaagatgtcagaagagtgcgcatatttgtctgaagcagaatcatttctagaacctccggtgttttcaaggctggaggagtcaaggtcgacacaatgaaggccttcctggccgctgatctcgtggccggtgccatttcgcgatgcaggacgatattatcaacagatgaccgggaactataggagagctctgaggggcaactgcattaaggcgatatctaggcgctatcggcagcagaccctcactagtgatgaccgtaataatggaaaggtgcttccacaatcataaaaaacaagattgtcggccgccccagggcgtcctataaatcttttaacgatgctgtacttagatatgaatgaattaatccaaaagataaaggtgaccaacgtagcaaaaattcccgactccgactggtggtcatataattgcaaatctctaagggtataatgctgtttaagtgacagaaacaatcagagattctatatgacagttgattcaacgaagttaatcaaattaaatgattctagtatagctatttataatagagatgttatacctgctgtaaggaattgaaaaagtagtatatatgcttataataaaaatgctattaatttaattcctattaaaagcaaatatgtaatgaaattaattaaagcttactttaatttatatcatttacaactagaatctttattaagaaaaaatagattacgtcgtagatttagaaaaatatctacaagtagaatatttattagtgatggtgaatttaaacatactaatgataaagtaaatataacattatatgtttataataaacaaaaacttaattttttattaaaacttaaaaaaagatatttaacattatttaaaaaagctaaatttgctagaaaattaaaattaataaaaaatgtaggattaaatattttgtgtaaacatcaacaaaaaagtatattattaagtaatcttttacctaaatataatactcaagtaaatacagcacaaaatatttattattcaagatttattaaaaaaagttttaaaagattaagattctacatgtatttaaagaggtctgaatgaggttgtagagaaatgaggtggaaaggagtacggattttgatggggtatgacgggcagaactacccgtaggcggtaggaagcgattagccaataagacaacacaaaacagcccaaaggcggtctaaacaccatagtctttaacaaactcgtgcaagcccattcacccatgagtggtgagtgacatgagtgatataggtatgacccatgaattattttaaccagcatatattgaagaggtagtgatcttaatggtcataaaatcaatttccggactctctaaatctatacatatcgtctgttcgtctacagagattgatctaaatgtaagactaaaatctctgtatttacacagaagggattctgccatgccgccgcaagatcgtgttcatgtcacgcgtgtgccgatttttgtttctctgcctccacgccagtctcctcttcttcaccagatgttgtaattgcagcaggctgctacgctcggtgcccttgactaggcatcaagcttttgtgaggggattccaaccagaaactctacccctcagccacaccaaaaagattgtcgcgaccatgaagttcacgccactgaacaaggccgcaaagcggaaagagcccccatctgtctctgcaattgcaccagcaatcggagggctcgtaagggtaccaatgcctgcgatagcaagagccagcccgattcgaaacccgatctcctgaggtgggtagagagtcatcagaaggggcggtgtcaagccaatggtggtgccagatccgataccaaacaaagcggcgaagacaatgttggccgcgttactgcgaccaggcaaccataaggccagagtgatgacaccagtgaaaaggagcatgatgataagcacattgaaacggccgtacttgtcggcaaggccattgggaatcgtacgtccaaaaaagctcgctccgttcatgatgggaatcagattgtaggccatagttattgacattccgttatgcatagcagacaggacaaggtagtcgaaagggacaaacaatccccctaaaccctggttagctgtgttgcgatgaaacataatgataggcggctcacagtaaaggaaaaagcagaacgtcaacaagatcaagaagttgaattccgtgaaaggccgaaggtagttcgcaaggttgaactccttgcgagtgtgaggcaagttggaggagatggtgagcatggcaatagcccagagcccaaggatcaagaaagcgcagattcgcatcgtccatgcaaagccgacctccgaaaggaggttgttgaccataaggggaaatattacaccacccagactcgagcctgcaacggtcaatcctcctgccaaagcgcggcgctttctgaagtaagtcataggctgcgaagcttgtcaaagaatgcgcgataagttccaagagtgatcacacaaaccgaagtcattgccggagtgaaaatgagcgatgtgccgattcccgagcaaatcgactgtgccaagtagaattggtagtatttgcttgacaagctggtcatcatgaggccaaacacatgcatcaatccaccgatacagatcggcaatcgtggtccatagttgtcgaatagatatccagacaacggtgacatgaacagcatgaagaaaactagattgaaatgagcttgttgtttcacggccggttggggaagaaggctctcacattcggacgaagtgatccaggacacctccgagctgctataggttttcaactggttggtctgatattcagcttggaacagagcaatgcaattgacccatccaaatgagatgaaaagacccaaggagcctccgagtagcgataagaaggcatttatgcctccttcaggtgctgctggtggggcagatgcttgaggcttgggctccgctggactcgatggtctcgaagaggttggactgcccttttcgagctcagcagtacggtcgtcgtgcatagttgctgtggggtgcttgatagggcgcgcaaaagatagttgtgcttgtgatgtcgattggaataacgagtccgattctaaagaatatggccagtactatatacctctggcacgaggccaagttctgcgtatgaaaggaggtcggatatacatgctgtagctagcaatgcccgatttcgagtaaaagatcggacgtccgatgttgttcgttggtgatatacgcaaaggcgctgctgcacacccgaggccgagtccgcggccgagctattcaaaaggaaagccgaccccggtcggcctcggagttccggactcggcttggatgtttttacctataaacattcgtcgtccacctgcgaggttttaaggaatcattcaacaacaaatcatggactatcctcctcgccgattcagtcgatttcatgccagacaagtctttgctcgagccaactttccgctgcgagcatacggacccagaagagggatggcgcttctcaagatcggtctgttcggcactgttggctacttcgtcgcgaagaagcttcttcggtaagtcggtactcccaagacactatggtcaagtcgagaattatcaactgacgtctatcagagactcgaatgagccacgtcaaaatcctcaacaatgtgcatcgtgcggacatgagcggcagcaagaatccaggcagcaaccgacgaacgttcgacggacgccataccattagcattttgcagttatcagccatgatgccagtcagcctcaacaatcagctatttcctaggttcagtagtcaacaggcatacttcgacggctcgggcggtggtgacggaagcaatggatataagacgttggggtgggcttcgacttactcaagattctataaggcaaattgggactgttaggtatcgttgacaacctattgttctggcgctttcttttcatagaagatagaggaagagagtactctaatgactatttttatcttaccgcctaacgaagatattcaactttgaagattgtcgtccttatggtccgaaattcccaaataatattagcgtatatccatgtggtcgaaagctctcagacaggtcagtgttgtagtcgaaaattctcagattagactctatataactagggaattcagggtaaatagtgtcgctagggccgattttggcatacctttcttcccacggaccctataaccaataacggctctgtcggcggcgccataatcgcgcaagacggaaaggagacctggacagtccacgattatttaggctctgactacaatgcagccgatttaaccgtcgagaagacagtcgcccagttccttggcggtatgggctcacccaacccgatttctattgatgaagtaactgcaacctccatcttcacgccgacagtagttctcgccgaaacgtggagcggaaatcatcagcgcgtcttccttgccggagatgcttgtcatcagacaattcctttgggcggctacggaatgaatatgggccttgctgatgcttgggatcttggctggagactcccagccactattcaaggctggggtggcactcacttgatgaagacatacgaacaggaacgtcgtcctgtggcagcgctgatgcaacactggcgcaaaatccacatgatgaaaattatggggctttcaacagctgtaaaattggatccggtcgtcatcgaatccatggatgagcgcggcatagccctgcgtgaggaaatcaatcagtacattcagcaaaacgatgaccataatcagagcttcggcgttgaaatcagacagcactacgagtcgagtctggcagtactgagcgagcaggtagatgttgaaaaggcagcatcacagttcgactcacgcaactacatcccaactacctttcctggttcgcgggtaccgcatgtggctttgtctgacggcagcgccatttccgatagattcgggaaaggcttcaccatggtcgcttttctgcagaaagaagcagtagcagccggagaccaatttcaggtgcccatcgcactggccagttttgaagaagcagcacggcagcacagtattcctttaacgagcctttgtttgatgaatgagactcatgcgttccgaatttgggatgcttgtcttctcctcgtgcggcctgatggattttcagcgtggcgctcagatagtctggacaaagtgcacaatgcatcacaagtgttgcttcaagcaacagctcatacctcacctttgtaagcaaacccctccgagacagacgatcggacatagaacagaatagaaagaattaacctcaattaatcacgatcttcatttcgcaacgtaaatcgtcctgtggacttgctctatcaaatagttggaaccaaaaaggccgaaaagtccaagtagtcggagtcctgacttcagtcagtagtgctatgtaagaggcgcatatttggtaatttgtactcaccattgcgccaaaatccaggccgttaagaagctcattatcgatcacgtcttgcgacacttctcggggagtgttggcggccctgtaggactgtagtacatcgtaacactccttcatgctgtcttttgcagtgttcagcacagcagacaaaatgggttggccgcgttccatggcgtgtatctgggaaagaatgccagcaagaaagatgtagcgtttcaacgtaggatggcccaactttacgatctgcagtaattgttcgttgatgtgttccaaaagtcggatgatgggcgctcgctggccgcgcgccagttcagcgagaggatcaaggaccaatgtgtggttgagaccaatcgaagcagataacggaccaaaacccgtttcctccagctgagacacaacctccaagcccaagactgaaattacgtccaggctcaaaggtccgcgaaatgaccctgtgctcatcaccatcaacttggaaagatcgtcaagagagtctgtaggtagctgaagtcgctcggcataagtggcgataatcattgcagactcctgacaaaccctccgggaaaaatagaagcggggatccttttgcgcttgtagcatgaaaggccgatgcagaaccagaatataccgacgaatctgcatatcaaggaaagcgtgatgcatgcttaggaattgcgaccaatgcgatcgacaatagcttgcaagagtacggcaaactgtctgaagtttcgtagctagctcaatggccatttcgtatgagtgctctaatcgctcgttttggaccgccctgacaacttcaagtcgtatcggcagggactgacgcatgagaatttgtatcgacgattccgtatagcttgtcaacggttctggagatggagactctttgctggctgaatctaaatcagcatcgctgacattaagaggcatatgatcgtcaaaatcgtttgaagaaagaagcaaagggatggaactgtccatggaaccatggattacgagctctaggactgttgtccaaagcctgcttcgtatcccggcttgaaaaggagacagagaaaacagttgtggatctcgatgcaggcccatagccatagccacccgaagtagaccactttccgacagccacggtgaacggccgactaatgttatctgccgcgaaaccaatagaagacagaaaatttgaattccatcaagattgttggtagttttctctgacggtccaaccatccagtattgagcagcttgtatccaagtacgccgcgagcgctgtagaactttgtcgtcgtcgttgctgaagacgcttccaatggccaacaccaaacccaacttgattgcaaagtttgtaactacaggctgcggctggctgaagtattgttcgtattctgcccagaatgtgggaatgtgaaaacaacgatagatcaactcgaaagtccgcatgtagtgattcactagtcggtcacagatggaacgagtcggcattgtactcaaaagttgaggaacggggtcatccatctgcggtgcctgctcatttttcatcgtgagtcgcaagttgcgtatctcattcacggaatcggccagctcggccttggtatccacgaaggtcaattcaacgtcactgtctccaacatggctgactctgaactattgacacatcagccaatgttcaactagtcaaggtgttcattagaaaggtgcttcaacgataccttctcagcattgtgcagccagtggcttgaaggaaatagttttaccttcttctggttgtgacgaagtcgagggatgacagacggaattgttagagacttatcgcccgtgacagctgaaggcgcaggacgagcttgggagagctcagcaagccgctgctcgacgtgttggaggcgatcagacaatgccagcagcgtgagatgattgttgctgctgctgctgctgctgaggctgtgctgctggggatcgacttctggtacaaccgagtgctcaagctgctgtacacgtcgctctacgctccgaattcgctcagattcattcgttgttcgttgcctctttgcagggtgatcgatgttgttatttggggcaatgctgagtgagcgagaaacttgttgttggacagtattgccctcgcttccacggtcttccagggcgagactgggttgctgctgatctccttgatatgtgcacgtcaccgattttctggagacttgacaggctgaacatggcgatttaagatcgcaacgtacttttcggcggcggcacgggtcgcaggattgcacaggtcggcggctccgacgagcgggtgaagatgctaaccgggtactgccaaagctctggtcctcagccatcttgacgacagtccaaattgcaggtattgaatgcgcggtcaacggacatcaatgatgttggaaaggtcagagggaaagctcggggtcggcaagctgctgaagtgaggcgctgtacgggcgactaagtgccatcggaatataaccccctcatcggataatattgccaagcagtattttagatccgcccccagctgtgtaatcaggctctcccacttctgtgtctactctctcattctctctttttctctctttttacaactactcgaacggagtacggagtacggagtacgtcggaaactaactattagtaatattgaagcctagacatgcatcattatacccgaataccatgcctgaatatttgccggtaggaaatgaaaggacaatgcgctagtcctaatctagttaaatttaaattcattctataattgcttcgcttagctccgcaataattgaaaattaatgcttcatgactatttagttaaataactagttaatctatttatacttgaattatgaagtatactactctgaaagcttaccggatccgtcaatatgaagctattcggagatacaccaataacgaagacttccaatttcaaaactgtatttaaatgctggatagtagacagcattgaattaaatgaatgcgccaggtaactaattattgcggagcgaagcgaagcaattaaatcataacctcgtgtatgtatatcacgtgatcaggtatttttatcctatgggctccaaaatcattgaaactatgtcacgtgaagtattgtcggctaactttggcagaataaatagactaggcctaacggacatgtcccgagggtccatgcctggagaatgaacgaaccatcattatcttccccagagcttctacagtcacactttacgtagcattagaagttagaatcagtcattttgctctgaaacgactatccggcggccgcaggccgtccagatccctcgtaattatggtgtagaaattggtacggagcactccatatagatgaagctattcagagatcactatagagtacataatgcaaatggcttccaccaccactaccaataatagagatattccaattctgaaaattgcatttaaatgctaagtagtggtaagtattgaatttataaagtgtgtctggtaattaatcatagtcatggtgtaattgtacgaaggaggatgaataacagagctctcgacacaaatcctggaattgggcgaaagcgaagggcctgctctgagaaggcggtggttgatgacggtgagctattgtccaatgagagagctatgttccgatggcacacttagtcgcccgtagtgctgtcccatcttgctctcggactcggagctcggacataaagcccactcctctaaacgttcgccacccaccgaccaattcaacctcctcagtacaggtattttcatacagccctagtcgtccccgtcaagggcgttgacacctttgtctgcgaacgggtggaaagctttcgtactgcgtcggagaggactgatgccaaaatccttccagttgatgttccaacgaaaagctgattcattgctccacacaaggcatcgcgcctatatctttgcatgaagtgactacctgggcaagtgatttgctcgtaaaagttatatgaccgtggacctaggctgacaatcagttctgttgagttacaaggttgaaagcaagtaatacagcatataaatgatccactagatactaacggcagggagcaaatgtttgtatgcaataatggatgattggaattgcctaattctaggagtatatctgggcatgttgaagctttggataggtagtatagagttttcacgcagtggatcgctatataaacccaccaataaacgtatatcgattttcctgtactaaggacgggccaaacttcgaggtaaagaatggacgcatttactatgaaggcaaggcaattgaaattagggctaattgccatgaactatgagttcagcagtctcagcgaattcgcctaaaacaattatcgtacgcgtagatgaaagagaatttgtgattacatattttggatctttgatagaattcaaagtggttatggattagtaccgatatgttctatggagtttacaaaacgcgcgaaaatgacagttctttattcagctatgttagcgagccatccgtttcggaggaacttatgcattcttggccggttgggcagcatccaacattcaaaagacccatgagcgtactttgtcgcagactactcattcattgcctttgcctcttcgttttttttttggatcgtaggagacgtgtctatcacctcgtttaaaacttaagagagtaaagcatctagaatactggatatttatgcatttgtatgtacctgaatagccgcaattatgaacttggagggcttagcatagtaaaccactaagaaaacaggcgatacatgcatttctacggtagaaatagcatcatattgacgtactgatcatttataatacgccataaagagcggtgtggtaggctaccataggcggaaccatttcaggcactcgggcactaaactacttcccaaagggggcttacagggggttgggaccctggcactcataccgcttcgtagtgcggtccctacaaacttggtagatccagggacgtagagaaccagagattttatatcagatgagactggcagtatcgcactatctttgatagtggtgatgggtttatcaactccccatcttgagaaacgagaagtgaaggctcagccaatgatgatttcgacgatttttcccgcggcaaacacgcaatctttgccgtcccagtcggtcaagggcggagcggcatagcagtacagtatcctccccggcctgaatatttcacatccttcgtgaaaaaaaccagacgaacacaagcccaggccccgaaatgatcggctccggacttctgagtagtgagctggtagatcgagaagaaggagggcgtctatagacacggagtctcgatttggctcataatcatgcaccttgaaatcaatcacttgatcagcctccatgtcaacaacagaaccatgagtgtcagattgcgtcgatccggagtcctttgaccactggtaaacccaatatctaccgcggacaccctgatcggtgatcaggacatcccggccccagtgcatcggctcctggagtttctgtcccagcatggctcgcggaagacatctgaatccaggagttgacaacttggggtattccagcagaaccacgtccttgggaacagtgccaagttgcagccagaaattcttcactcgatcctcgccggacatgtgaacaagctgggagacgtcgactccgagaagaggagcaatcgcaagcagttcgtcttccggcctcgaggaatcgcgtaggcacagcatctgagagacctgtttcatgcgaaactccacgttcgtaagggagggaagactccggaactctcgcagcataagtgtctcgatgctgttggagggtcgcgtgcggcagctctgatctaaccgctggacctcgtcaaaagagagccctgtcaattgcgacaggccatgtagcctttcatcgtcaattggttcgtctgttccgtctagtacatcccgaaaaagtgatgaaacctccgcgagacctgcaggaaacaagatatacaggctttttgatagaatggcttcttgcaaggtccacaagcgccgtgaccaggcacaggtcataagccgaaacataatcgagaacccagtcaggttgtccggagtgctatacaagccattgtccagtacgatagtcatcgaagcttcagaatacacctgtctcatcttggtaatggccattttccgcaaccgtgaatccgctggaatacataacgcatcgatccagaggtaccatggcacctgagcggattcagaatgcaaagagctctgtgccgaggcacaggcgagaccagcgagatgctgaatctggcaccctggaaggcccgtttccgaggttcccatcagaccgtcggaccagacatgggagatggcagcgaatttcattccttcctgatatttgctcaccgcgctatatctcatgcgatccctctgtgagtcggaaataccgggcatgagagctaactgtaaacgtcgcatatcaatcaccggaaagccaccaccgtcgaccgcggcaataatttgatggagacccggggccacactttcacacttacagtccggctggcgatgcttggccttcgcggtatccacatccaagttgtggcctatgcacctctcttccgaacacgcctcgtgtctctcagtcggcccgtctgtggcagggaagatgcaagcatattcgagaaggtgtaaacttccggatattgagccgaaggtattatacatggatggacaccatccttgactcagcaatcgaccgcgcagctgctcctccatgcctggtgttcgcatagacatgagggtttgcatcggcctcctctcatacagcactgggggcgcgatagaaatcatatgctcgagcaaaagcagcgatccccgaactatatggtcaagcgcagtttccgtgctttcgggaagagacacttcgccggataaactgctttttgccagcgctcccagtccaaacaggatggcttccgctttcacacgcgtgtcgtcccactgatctcgccactgtgaaattggccatccgaccccactcagccgcaactcccaggagactttcagacccctgagaatcttcgtgtcaatgacctttccttgaggagtatccctcagactcgctgagaaggaatcgaacaaagcagattcaatcacaccgaagaacaaccaggactgaaccatgggtagtgcttcgtctggatcggagaggatccattcgataacattccgcgccggcagacagttgcgtacctcaaggtactccctgaatggaaccacagggtatctttgagccgagtcatgatttccgccaaaccaagggatatactgtattgcatccccgtattgctgcctctcctgttgggtcaggaaatagtccatagtaagatatttgtgatgtagcgaacagtgccttgcgtattgacaggatggcaccgctcccgatgttctagtttgaagctgtaagagtgcagttccgaataggacgagctttggttgattggacggcctatgaatgatgagtgaatagaactcatcgtaagtcctttttgtaacgcttaaatatgtatgtctctgggtacgctttttggatcgaaatccctgaaagtttacagtatgtaacagccaaatcagcatagaacaagtcgagatttctgatctaattggggcaccatgtcaacaaagttacaataccaatattttaataccggctgcagcatcggcttggagttagtcaacgagggtattgggcatcgctgccaactcattcctcttgaggctgaaagtgcggggtttcgcccgtttcaccacaacacccgggtatttccaccaccttcttctacgtaagtggatattttatagtcaatggccgcagatcaccacccaggcccaatatccttggaatccgggtggatattgtaaccccaaactttcagtagtgggggcagtcagaaacttggagctagggttatgtatgaggcgtgcatttgtgcccagcgatcaaggtcggctgtgccccccagtcagcgtcgttctaaaggctcgttgtgcagtctcacagcccctcgacttctcggtgggaagcaaaatccatggatataaagagcgatgcgccattaaatatctacattccttttgcaggtgattttttctaccaacatcgtctctcgacacttggtcaaaactttcccataaccagatgcccatcacccttaccacggcggcccattgcccccgcaaatgggaaaccccgaaggtatccactgctgaagagctattcaaacgctcatgtccgaaggaccatgagcgcagccggaaattgatacagagttcgtttcagccaagtctttttcgcacgtctcatgtctctgcctctcgacatggcttcgtctgggccgtgtttctagcctacagcgatcaccataacctgataatacggcccgaagatgtgtggttctccattctgacacaactcagtttctttgtgaacgcacatgcagaggagctgcgatcttttttcgtttcacacgagggacaaaaagctcttgaagtcattgaagtgggaactatccactccgctgactttggtgcgttggccttacgaatgaccaggctgattgagaaaagtgtggtggacgaggagttgcgaacctggatcatgccagactttagcacctcaacagaatccgacaatgtggtcgcagctattttgatgatgggcgctctacagaagtacttttcgttcaaagtttcattgacatgcggaattccgtctgtcacattgttaggcgagcgaaaggactgggaaaatattgtgaagaaacttgagaagctatatcagctaggggacgagcctgcacggtttgctcagcttcttcggccgatcctgaatcatttcgttgcttcttttgacactccaaactcacctgatgtactgagtttctggagcagatgtgcccacaagcactctatgggcagtggaccagactatttatgtggctgggtttcagctttctgtttctggggtgaagatggaaagttattatgcgcggaatccatccattcctcctcctccccaaatttccagacacagaacactgaatgggggttggatgctgttttgtcacgtcgcatcgatacagatgatgtcccgtctggtttcgcctccgtgccggttactatcgacgacaatggggtagtttatgacgctgttatgttagctggactgatcggtatccaagccacatccagcggagcaatgttggatggtactagagatcacaacgacagtggtgtgtttcaatacaacgcaagcggccagctggaaccgatcgtttatagcatttctcctccgactgaggaagctgcacttgactccatacagccgttgtcaggatggtggatccatgaaaagaagcgtgcgaaggagacagaagaccgcaccgtggaaaaaaaggaattgcgaaccacagaccgggctctcggggccctcgacgcagtagctcttcggaaattcactaggattgggagttggaaaaggtccccggacttgaagaacttagcattctgatctaagcgatgaagtctgacagcgtgaggaataagcttatgaggtatagtcatttatttggtgggagagtctccagtacggttctctcttcacaatcaaggcttcaacaccggaatagaatagaattgagaatttcgtcaaatgagtgattaccatggtagactcaggccaaataaaatagtacttacaagtgaagccacccggggcgtgatgccttacgtgcgatgcgcttattgagagccctctagaaatctttacagacggctggggtttaaagaataccaccaatggtcctactggtgtgaatctttatgaactattcacgcactgttccaatgtgcactttggatactctgcgtacaagtatgctccttagatattccttctcatataacccaagagccactgagcgcagcttctccaatcaaacttggagcggtgctgatttgaatcgaattctcgctgctatgaagttgccaaacaccgggcagatattcctgatatgcattgggaactagagagttttattgaatgatgttgttcttgtcaacgttctctgagatggaagagctgctttggtgctagcactcctctgagatggacgtaatggagccttgttggccttgggcggaaaggaagaacgtttgaagggatcgacagcctgtttttaccacgtggggacatgcctgaaaagaactgtgataggaaccaatctagagggatgaatattcgaagggaacagacaaggtttcaccaagcggtgtcggcaggaaaagcatattactgcagctgcatccatattagctagcgtcgtcagatacgctcagacccatagaactttggaagccgacaggataagtttaccatccgcaccctgctggatttattggttgctgctccattccagagctttcgacatgggacattgacaagttgacagttctctgactggtaaagatatactgtaatcaagccttgaaaccttggaacatgtatagacttccatggatctaggtagccatgtggacgagtcactaaacacctttttcaaagttcaatgcccttatctagtcctataactgcgctgagcaaacctgctgacgaattagggctgagacaatctgattagtctattaaactaagtaatccgatccggttgaactcggttctaaattgagctaagcgctattagctagggtctataaggctctcgcacggagtgctgggccgaaacagatttgcagtcccgctgcatagggatgattctcctgaaagggtgtagggcgaatgcgcctgtatgcgcgtaggttaataatataaaatatattgataaaccatctacaaactatagaccagccgatagacatcgtaggtgtgagcctttaggctagcgtcatactaaatgaaactgttgtctcatttcgagcggcatggtcggggctagggggaaacagggccggatgaaaggcagctcggattgcaatcgcaggatcgcagaagaggcaaagagtcacacgggaaacagggggtggcggagcttaggagctcagtgatccgggtcaatggcgaaaatgcctcaactgcgaggggtaggagaaagaaggcgaaaaagaaaattggggctgttggatggagagggggagagcatggggactatatagaaccacgcacggggaggcataaggacaaagagcgctaaacctaaggggtcgaaactaaacctaagagagtaattcgcagtcctcatccgatatggtgtagtggctaacatcgccgtctctcacacggcagccgggggttcgattccccctatcggagtttcttttttgattcttttcttttttttccttgtctttatatcctagaaatgttagaaatgaaaacagttggtggaattggcatctcgttccaatcatttttggttcgaacaagaaactatatcagagtgccaaggcatattaacaaaacaaaacagagtaaaatacactcatacttgtcagatatatatcaaccatcaaccgagtgaatccagatatatttactccgtggagcaacttgcttcagtcgcatgatttgcgatgatctgcgcgtagaccgagattgttggaatatttaatccctagcagtcgaggatgttccttcggttgttgtggccgagaacaagggtctgaaggaaatgcgagaactgttcttgaagactcaatggtttggagacatggagcggaaatgtacaaagacaaagaacataaatccatacatagacgcatacgtaaacgtatttccgagtgatctctacttacttgcttgggtggacaataaggtctgcgagtaggactgggcctgggacaaatatcgggctagacgcaataaattccaccacataagtgcacattactatagtcaattgcaacggtcctttcgagctgtgcagcatgtgtatttcacgaaaacaagaagaagattacatggatgatgtgttttgctagccgagctagtctaggttagctaaaagtggtacatggtgataggatatatgagatctgaagatttagaagtgaatggccttagagtaggtggccatggcagcctccttgaaggcttcggagagagtggggtgggcgtggcaagtgcgggcaatgtcctcggaggaagcaccgtactcgatggcgagggtggcctcagcaatcatctcaccggcaccggggccgatgatgtggacaccgagaatgcggtcggtctcggcatcggcgatgaacttaacaagaccctcggtgtcgaggttggtcttggcgcgggagttggcgctgaaggggaaggtaccgacattgtacttgacaccggaagccttaatctcagcctcagtctggccaacccaagcgacctcggggtgggtgtacatgacgctggggatggcagcgtagttgacgtggccgtagccggtcttgatatattcgatggcggcaacggcctcctcctcggccttgtgggccagcatgggaccgaaggtgcagtcaccaatgacacggacgtggggaagcttcgtgcggtactcctggtcgataatcaggcggccacgctcatccttctcgattccaacctgctccaagttcaggccatcggtgtagggacgacggccaatagcgaccaggacaacgtcggcgtccaatgtctcctccttgccacccttggcagcctcaactttgagggaaatagtagaaccactgtcatcgccggacatgaccttggtgttggtcttgaatttaataccctgcttgccaaggatcttctgggcctgcttggagatctcggcgtccatgccggggccaccgatctggccgaggaactcaacaacagtgacctcagcgccgagacgggaccatacggaagcctataccacaatgttagcacgatctagcattcgaaactcattccgtagttaatacataccatctcaagaccgatgataccaccgccgatgacggtcatcttcttggggacctcggcgagagccaaagcaccagtgcttgagacaatgcgcttctcatcaatgttcaaaccggggaagccggtggcttcagagccggtggcgatgatgatgttcttagcacgcagggtcttctcaccaccgtcgttgaggacgaccttaacagtgttggcatcaacaaaagaaccggtacccttgatgtactcggcgccgttcttcttcagcaggaactcaacacccttagtcaggccttcaacagctgtgtccttggccttcatcatctgggtaaggttgagcttgacatcgccaacgtcaataccacgcttcttggtatcgtgaaggacctggtggtagagatgggagttgttgaggagagacttagaagggatacagccgacgttcaaacaggtaccgccgagtgttccgcgcttctcgatacatgcggtctgccagggtgttcagttagtatgcggattgcgacggcaagaccgacctaatcaaaaattggaaagcctagggagaagtggttcttaccttgagaccctcttgaccggccttgatagcagcaacgtaaccggcgacaccaccaccgatgatgaccaggtcgtgatctattgctcgggaaagcggatatcagcaatcgcgtccggcaagaaaacagaacctctccgggtactccgggaactccgtgatggcgatgtgagcatcgacttacctgcttcagaagcgaaaccacgttttgagtggccaatgaagatcatgggagtaacgaaattgttgggaatagccctggagccggcatggcggaaggcagaccggggcgaagcccggggcaagacggcgcggaacataacgaaaagaagggacgaaaagattagtagtctttagatataaatgcaatcctcgatgtaggcggattggagttgttgggagtgcgcaaatagggtggtggtttagagcacgggaaatgactgagcttttgcggtattgcttggcctcaccgcctactacggaccatgccgcaaagctggcccgtattaccaaggcggtaagacgggccggcaccttgacggatgatctcgggatccgttcccgatgattctgcgggcagaatatctgacataggaatcgcccagacattttgattgaacttaatacgatgctaggagaaaggaacattcggtaggacctgcaacagtcgtcaagtcttctttgaatgacaaaaccccaggtattggtggtttgactcgggtcatggtaccgtctccttctgtccgccctggagaggactactccggggaacgcaatttgataagccactccctaagggctgaaagagttagcggcgattccccagagattcttttgcctacccgcggatcattctatcggcaagcagtctcggcgggctccgccgcaattataagcgcacacgaatccaatggattgtccgtaacgcagaccataactcttcgcacgggttgagaattgtgttctgacgttgatccctttatgcgagaacccacatttcaagagatgcgggtcccaattgaaccgggtaccgtgatataaaatgaagttctccagtgcttcttggcgctctttccaaccagcccttaatttttcacgacttgttttctatatccttgcagtttacaatacccatccatgcgctggtaaggtgctggaagagaaatggcacatcccggagaataaccatcctcaacaatgggtattcgtacatggcaataagaagccatggaaagagacattcagactgatacaaagctacatggcatagacaatgaaagcttctcgattgaagcgaaaattatacaccgttaatttgtaagtaagcgaggaattgagaaacaaagttcaaaaccatatcccaggtgtatcctctcgaccgattcgtgggttcatgagctcgtgcaacatatcaagacagatttagtcctgtccacaagacgatttctcctcctcctttcgatttctcttctgtcgccacttgattccactagccgccactatccacaagcaaggagaaacagcaatagagatcaaagcaagtgtggtgtacgcccagccctcgcccatggcagagcgcatagggctgattgctgctgacgccgcggcacccagctcacaccggaatagattgttcgctgcagtcgcggccgccgacttgcccggccagagatcgaccatcaaggcattcagcacttgggaggtaccaatgatcgaccatccggtaatgaacaaaagaatgataggagcggcaaggttgaccttgtgacccagcacccagccgtaggtcagcatcgacacattgctaatatagtaaagcgggagtgcgacttccagtctcgcgcgctcgatgttgaagttgcgaatgtccgcacgcacattcttgacgatggtgagaccagcacgttttgcatggcggcggtagttccagtcgaccagtcggccggttgtgaaggctgaaagcacccctcctccgccgatggggaggtacatcaatgcagcatggaggtcgttgaagtgatagatcttgtggaaggaagtcgacgcaccggtcatgacagcatagaaaccagcaaacatcaatcctgtggtgatcaggaccactgacgtctcgatatccaggacaaccttcatagtcgggactggtgacgggaatcgaagggagtagttcttccgcacctcagcttccttgtccgggtcaggcaagagacccttctgtctgcgcgtgcgatgccggataatatctgccacagagttactcaaagggggcggtgggatggacccgtctccaacgacctttcgacaagtttccggtaggaatagaccgaggatgaggaagaacacgccaccgaagatgagcagaaaccagaagatccagtgccagttagtatactgactgagaaggccgccaatgatgggcgacaaagaaggacctaacatgcttccgactgaagcaaaggcgatatatgagcctcgctccgcggatgtgatcatgtctgcgaccaaaccgttcgccagggccacagtcccgctgctccctgcactctggagacatctgaggaccagcagggcagcatagctgttttggagacctagtcccaggttggctgcaaggtaaattgtgaagcaaatgatataagcgggacgacggccggcagtatccgagaatcctgcgatcaacataggtgccactccctgcataatctagagataaagtttatcagttgtgggtctctttaacaagattatatttcgtcgacttaccaggtaagtagtgactgtcaggttcacctgtgagacggagatattcagggaattcgcgatagtagtcaaggcaggcagatatatgctggaagacaagggtgagaagaaactggccaaggatcccatggcgacaatggcccgcttctgggctactgtgaactgggaatatccttccaggcgcgtgtctccatgctgggttgacggatcgggtgttttggtctcaacctcgtcaccgcgctcttgcgccatgttgcctttgtccatttgattcatgaggtcggggatttaactgaccatgtggtagaaccgtggaagatgcgtttgatgaaatatcccgatagttttgatacttgcccggtgcagggaagtcaaccaattagagtttgtcgtcaatcccgggaccggcatcgacctgaactcagccttatatcaggtgccttgctcttgccactatttagttcatgcaaccatatgtacaaccgtccttgtgttcatagatgccaggaacgacttgcttgcgataagtattcttttcttctttcttatggccttgaattttatatttactcaaacattctcgtgtagattagagactcgagtgttcaaagtacttgtacatatcgatcgcaatactatatctcgaagacaacatgacgatgcttgtgctcatggtcatatatacttcagctataggtcagcatgtactttcgagctatcatcattggaatagactcacaccggagcattagaagtataaatgatgtcatctctcatcacaaagacattgtttgcggagaagaatgacatcttggcaaatcaagatttgcggagacaaagcgattccggggccgcggagttggcttccgcgcaaactttccgctttctagaaaggaagaaccgagacaacggctgtgtacaaggatagacgaatctcggaagcaatcgaatcacacccggttatatggatgcacaaacagctgagtccccggacttcagcttttccgtattctcttttccttcttgagctccggtgcgatagttcgatttagttattgttcgtgaatcgcgattcaatacacagacacgaacttaaccaacgatgttgcaatactcctccccgagaagtacatatctattcccaaatgaggttcctaatgggaggcaggaacaagatgctactataacagactcgttagaagttgcagttggattcgtcttaattggctataacaatgtgttttgtgttgtagtcgagaacagtcaattctctttttccacgattctcccttattacggcagccatcggcattggagcccttctctcggtggttcctgtgtgcctcatacttccagaccaaagtgtacgatagcaccgacttctttgctcggttcaatctcacattttctagtgctttttctcaagtatatgggcgccgaaactgttagcaacgccgcagtctccaagtacgcggattggatcagggtccttcctaatgaccgttttcatcggtttttccattgccgacattgctggctggcctagctcagttgagtggatgcgatatctgctataaaatggatgttccgggtccgagccgacagcaaattagctagctgggttgttatcaggccaccacggccaagaactacggcgctgcctccaacactaacagagtcggcatttatgtcatataagcaagcctttctacaaattttctacttatttccccacaccgccggggctaggcggtgattaataccggcgttgcggacctggatgtggcgaaagccggccgtcccttcgctcactccgagggcaatacctgcaacattgccgaggggttcaaaagcaattgtatttttttttaacatcagtttcttcggaggctgtgagttctatctaaattacagtgaaagcgcattcactaacttctacagaagcttctagataattctcaaagggtgagacctgcgccagtctggccgacggtctggccgacggccgcaacgattgggtcaggtacaacccagatgcctttaaaaatgcttactggctggtgaaccgggccaagatctattcccgaacaactaaaccttggaacccgaggccggactgaataccgagctgaactatcatactttaccatgtgcctaacaaaagttgtatatacgtatgcttagggatctaggaaatgggacaagatatgagaacttctgacatcattcctccgcattttcggtctaatccccgtgaatgctagtacaaggtcgtcagggagaccaatctatataagtggacctggccgagcgccaaaacacgctaatcccgatttaggcaaaccggggactgatggatctctcgtacaactgttgtagatgacatccaatcataggcgagcctcccacgccaccaaagccaaaatcccagactggactgagaaatactctgagcgcccaaaagcggcatgccaggaccatccccgccgacccactcgagggaaaatgcggaggtcacagaaagccgtggcatcggataattgttcagagcggataatttcccaacttccttcacggactatgtagcgcccatcggttcgtactttcctttccggaccgagtctagcccgagcccaacgcaaacttaccgggacgtacagaagaacaatggctttcttcggattgccgatgtcagtacaacatcaatcgggtaaaagcccccagacttcgccccgccatggcagtcgtaccacacgcggtaggtactggccgagcccgcattctggccctgaaccccggttttcgcacgctggtggggggaggcccatgttgtatcggcgctggtgactggtttgctatctcgcgttccccatgttccaccggaatataaccgaattcgaaatgacactccttgcttttcagggctgcttttcggtcgatcccggggaggaggtgttgggcatcatcgtctattggtgattcggagtagtgccgtctatgtgaccaggaagtacgggatgcatgcaaaagctttaaaaacctcgggggatcgtctcttttttttttctctccgcacttttgatctcattttaccccacgggcaagggtctgcttatcttttctgctctttgttcctatctcggtctatacaactgtatctttaatgcgacaaaccttgaacactcgattcatccctctcgactgcgttcaaaatgtgtgacaaaatcccctcgtggaatgtcgtccatagactggagaagcgccagcttctcatcgggatcaactgcgtggctgctctgtctattttgttcttcggatacgaccaaggaatgatggccggtgtcaacaacgcaaaggattatattgatctcatgggattcggtcatacggagatagtggacggcgaggtcaccccggtggtcacgaattccctgctgcaaggtggcattgtgtctgtctactatttgggaacgctttttggcgcattgttcggtggctggctcggagaccggacgggaagaatcaagaccattgcagctggttctctatgggctatcctgggcgcagctctacagtgttcggcacagaaccataattggatgatttgcggtaagggaaatagggttcagtagatgcagacttggactaactttcgcagcgcgtttcgtcaatggtattggaaccggcattttgaatgctatcgttcctgtctgggctaccgagacggctgaacatacttcgcgcggacaattcattgctattgaattcacattgaatattttcggtgttgtcctggcttattggttggagttgtacgtaaatccctccgtttatgcgatgtctttctaatatccgatagtggcctgtctttcattgacaacggagagtcagccttccgctggagattccccatcgcattccagatcatcttcctcctaggtctctttggggctgtctggttcttccccgagtcacctcgatggctcgtcaaggtcggccgggaggaagaggctcgctacattctccagcgtctacgtggatctagcggagaggacctcctccgagcagaagccgagttccaggacatccaaagcatcgcagagctggagcggacaatgaatcatggcgactcatatctgtctatgcttgttgggtacaaatcgggagacctccacatcggccgtcgtgtacagttggtcatttggctacaggtcatgcaggaatgggttggtatcgcaggagttactgtctacgcaccgaccatctttggcatttccgggtttgattcgatgaagagtcaatggattagtggactgaacaatattttctacatggtatgtttcaaggttgagacaagactgagttgtgctaatgcgcatgtctagtttgctacgctaatctgtgtctttactcttgaccgcatcggtcgtcggtggactttgtattggggcgcggctgtccagggtattgccatgttccttgcgggtggattttcccgtctcgctatcgacaacaaggcagctggtgatatgggcaaggcatcctcgtatggtgctgccgcggcttcgatgattttcatctttacctctgcattcggagcttcgtggctcacagtcccttggtaggaaaccatcctgtgacctttttattcaatactaactcctgatccatagggtctacccggctgaaatcttccccctggccgttcgtgcacgtggaaacgcctttggagttgtcggatggagtattggaaatggatggctggtgagtgaacgcctttaaatgaatacaagaccgatatgctgacggaacgttaagactctactatgtcccgtcatgttcagcgccattggcgaaaagacactttacgtcttcgccgccagtaacgccctcgccattcccatggtgtgggctctatacccagaaagcaaccagcgcacgctagaggacatggatctactattcgcggccaagacgccctggacctgggatgcagagaagacctttgcgcgcctcaaggcagagaacccaggcatggtccagtctctcggtcccaagggcagtctgttggacccggagactggaaagcctctttctgttgctgcggctgttgcggcttccaaggctggtgataatgctgcaggagcggaacatgtagatcacgcttagatgagggaggacttgatgatgtggtgtttggtgatgtttgatgtttgatgaataaccaactaataaattagatggatgtatggctttagactgtgtatcttatccctagaatatcaaaagatcatgaaagaaagatgttattgaccgaaccactctgattggccacttcgagaacaacatccatcaactctacagttcgagcttacagccttttttcccctctgactatttctctctctccaaatattcattatcaacacaagtccctaccacatctcttcgcatcaacactcacgtggtaagtagcacaatcccaacgcgtcgcgtcgcaccgttcccggctaaatacaaaacaaaataaagatccaaaaaaggcctgcaacccaaaacccaagcggataacaacatataaaaaatctaccaacatcctacgttgtatacgaaagggtcgcataatcatgtccctctccgcccaacccgcagatccaaccccagacgagcaagacccccaaccccacaactctcctcaacccacattacccacagcgcaaaccaaaaaatatctccaccgcatatccctgcacccaacgctaaccccctaccgccggcgcgtgtaccgcacgctcctctccgtcccgccgggtcggtggaccacgtactcggcgatggcgacgtatctaggatccagtgcgcgggcggtcgggaacgcgatgcgcagtaacccctttgcgccgggggtgccgtgccatcgggttcttgcagcggatgggtcgttgggtgggtataaaggggagtggaaggttgatcggcataaaggtggtggtgggttttgcgaggagaagaggcttaggcttgaggaggagggggttgtttttttggatgggaaggttaggggggtttgttttaaggagtttgtggatttgggggctaagtgagtttttccttttgtgaagattagaggtgttcctgagttggtgttgatggttcaggctgtatatatcctgaaactgatttatggattcggtctgaatctcctacctgggtacctctatgtacggtggtgaagatccggagcgggaaggcctaggcgacactccagagcgatatgccagggccatgcgctattgcaccaaggaatacgagggcaatatgtcaaccagaatatgaacccattagacccctaacaattaccttggtttttgtagtggtctagtggtatagttaatacatcgtatttgctcaacacaatattttagacctggtcaaaggggctgttttccatgagaatcacgacgagctggttattgtaaaggatatagatgtttttcccaccatattgttcctttcactaaaaaggtacaagcttctacgttcagctctgccatacaacactgaccatgtgaggcagatgcacatcggttcggttacatccgcgatcgtcacttcctcggtctctctaaactggcccgtttggctgagatgttctctcacagactccatattcaggagcgcctgactaaacaggttgctcgagctatttctggggtactgaaaccgcaaggggtcagtattcttatgcaaccatcctacctttgtatggccatgcgtggtgtacagaaggtaggtaataccaccattactggctgcatgttgagatacatgcaatcacgtgcaatagatagggaagaattcttggaactcttgcatagaacgtagctaatccttacccatcggagatgctttggctacattacgtacatccactgtcacaaccgtttgaagcataataagtaaattattaggattcgacaatacctactttgggtgctccctaaagacgtcccgatatcccagcgcttctgccttcccttcaacgagcgaagaaagattagccacaatctggtcaatatactcctgtatccacgtactttggaagatacgggaatattctatattacacgtaaggcaatgttgtgtggcatgttaagtatgcaatatgcgaaaaatttcccgcggatggtgcgataaacccaataatattttgggatcatatgtatattgcgaggcaattgccattttctgacgtggcaccaattgacgcaatgtcccaactacccctgtttaccggtagctttgaccggctattgaagaatctcccaatgtgcgcttttcctttttcggtagtataaacagagtagtgttttaattcaattaggaactagatcagcaacctgagcgtccagcatggaatcacatctgctcggtatctctcaagcactttactagacagccctagatcagtcatcctctcatgtatggatgacgagcctttgaatgaggaggaaaattttgcgtactgttttggaatcagccctgtcgtattcagatgttttcttgttatgttattcattggatgaatcctcacaacgttgcctggctgataatctgttccatagatttgagtttcatcttaccctttatactacctgcgcatctataacggcgcttacaataggcctgtcttgatatttttcagccgtgagttcgtagtgcttactttgcatcgaggcagatgactgggtcacgagctgtgtgcgtcagtctgtaatattcgattttagatatatatgtacgtctacaaatcttagtgtagtgcacgtaatgtaagtctgcttgtataagcttatcaccgctcgttcagtcattagtataaatctacgcctccttccggtcttccacagtcttttgatatgcatgcatcatctattaccgctctttgtctgtacctagagtgagcctatgaatcccggtcatgggcgatactgacgagctcgaattgtttcgccgacggtggcgcgaggagctcttaattgaatcggaccgcagggcttctcctgctgcggctttggcctcaactgccccgcctcggaccaagaaaaaaatgtctattacgacatgttcgatgtatcaagatcttcacgatgaggtgtcgagcttgctagccgaggtagatcttcattatcagtttttcgaggaagatgatgagacgaaatgcactcgaatgcgtgacacaaatattatgggccgttttgtgtgcaaccaaagagcatgcaagtccaaaggatggtctagcaacaagatcgctgtcacaattcgtctttatccagagcaaaagtacaatgccagggtataccaccaacgctgcaaagcttgcagctcgctgagccggccggttttggatcagtcatacgccgagagaatcgtttactggattcaacaatggaacggaattcgggtagagaggcctccattctcccacgaaagaagaggtcctcataacagtcagctttgtgaggggtgtagagctgggcactgctcccaatctggggaggactgggctatccggctagaaatgtttgtctccccaaccaatacatatgactgatttactaattgattgccaggttgactctatagcgagccggaggtctatggttgattgcaggattataaactgtcagaatctggaatgaataccgtcatttgttcatccttgatacagatgggtcacgtaattgacaagtttggtttttctggcgaaaacatactcactcatttcattttgtttgttcttgattactgagttattgtccacaagattgtcattttcccggactagtgtcatcttagagagtgagagatgttattgagattattctgccacgtatacactcgcattaccaccgtttttctgtcacaaagccataaatgagcgcattggcaaggacagcatgtgacgcgaaatatccatacgtcagttgctgactacacacaattttcgttagttagtactaaaaccagactatctaaggtagctgatgtttaatgacagctattatttgcaattggaaaattgatttacctggttctcaaggtatcgttccagctctgctatgatccgcatgctaactctaaaccccattatcaacttctatgttaccgggaggttgtcgtctacattatacatgtatgtctttccacaacccgtcggcatctgaatgttggaacgtcaatgtgagggctcgatatataggcatagaagacaagtcttaccactgctatgatgttttttttccatgctcatttcgaacatttccagctgatagctacgtggctgaagatcgaccatatttgagaaaacgtggataagtccaatatgcggcaacaggagtgattcgatgcctctgactgctggcagttacgattttttaatcttctggggtcgaatgcagtttgttacttatggtctgcttttcgcgcgcgatatgtgatcacgatgcatatgatacatcaaatctgcactcccggtgccaaacttcctccgagaataaccaatcacgttctgcgacgtggatatgcgctgttctatgcaagagtgtctagtcggccagattcacggtttgctggggatgacacattttcctttcgccaatatggccatatttctatacataatgaacaactgatgccaaacctcgcctttgcctaattcaataaccgttacatctggcaccttatcacaatcatcttctttatcttattattcgtacactcgacatgagcaaggattctgtggaattcattcgaaagctagtcgcttgtccagaattaaccgagtcggacatagacgttgcgctaaccgctgctggagtagacgaacttctcccggatggaaacagaaaattatcccaattgggcttggcggcgaccgggttcttgattgattccagcattgcctttattacgttatctcgaggtatccattgacaatctgttgcgagtcttcccaaactgacaccctcgagattttacatcgaagctcaaatcccgtgtcaacggtatccaacaccgtgcagacattgcaaagcgtactggcatcgacaaacacttgaaatttgattgtcggcctggtgctcgctcgtccggcgttcttgctatagcgacaagcgccctcatcggagctatatacctcaggaaaaaatgtttcatgtccgtggccaagggactttactctctagggtaggtctactctagtaaccccaggaataaatccctaattgcgcacagcgtcctagacgagcaccttgaccagctcaacttaatggaaatattcaaagacgagcagagaaatccgctgcttttgccttccttggtggagagtgattctgcccagactagcgaaatctggagtcaagatattcccccttggccggattttccgaccactccggatctagggggtttgtctaactatgaaagactttacaatgagaatggattattgaaagatatccttccagatggactttctttcaccgactcgcgttcgcagtctcctttagctgacgacccaggccaacgggcgttagagaggcaggtccttgggatttgtcatcctattgcgtatcaagaaatgcaccatggaagaccccatgaggtagaaatcccgcctgaacaagctgaacagcatgctcttcctcgcagaatgtacgatcacctctctattagcgttgacttgtaccagccagatggcttctcaggccagcccgcgaaccaacggtcctcaagtcagcatttcccacgcaagcgagaaaacgctagtggtatggaagtacaaaagagaaagtctagatgtgttgatattgaattccgatcatcactgtgtcgagaagctgaattgactcgggctctgggtttgccgccccccggagatacttatttcaggcccaaaattgaggacaagatactgagtctcggttcagagatcttttccagtctaagtacctttttaattctggttggtggctctcaatcacttgttactcttcgggcggccctaaaatacacgagagagctgggggaccaaggccctatcgttcaaaggcgaagatgggtatcacgtgagctgaccattcacgaacgcttcgaaatcatcggcgaaattcaagacaacgcggcatttctccagatcttgcgatgtaaccatatcctgcatttctaccgatgcacctgcagtccggtggagcgcacctcaaaattcatagagttagcgtccaaggatgagctcattggccagccgagagcaagaggcaatccgaggaagatggaagtggctaaagtcgtcaacgaaatgatgagggatgttttcccagacctggagcctaactcagctgtttacaagagcaagcgccgaaaaatgttgggatttcgaaaatttggacaacgcctacacattctagcggactgctttggggatgctgttctaagcatacttcatttcgatcggtccggtgacgtggcgggccctgtgattatcgaaaaaatgtgagtctatatcactatgaaatcgtggcgaaatgtaaactgaccatgcaagtattcttgctccgtcggatgaggcatttgaaacttttgtgaaggtcctcgaagaatcgcaaggaagtcttcttcgggagattagcaaggcagccgagcaagctttcaatcatattctttatgaggatatgaagcggcaaaatctttttgctttagaaacactggcaccggaagagatcctgaagtttccaaaaggctcgcaagagctcagaaatctcttgcaatagtcacgtttcctttcgaaagagcaagaaaaggcgaactgttgctttcgggacacggtgaggaggaagggattcgtacgtgatagcaagtttgcagatctattttcatattgtattgaattaaatcagcgctctgtaaaaagaaaggggtacatcgagacgccgccaatagccagtctttaaatacgctactaactaagcgttgaacagcaaacgttctttccttatttctagcacggagactacccacctcatatgtgatacaactggctaccgtatctctccacagtacattccacagtgcgtatggtgaatttcttttcccgttaattgagactatgtgggaaacttggatatatcaagtaatggtgtgacaataaaagctggtggtgcattgacatggtacatatgcgacctagcgaatgcaaacaatgctccgtccactatcccatgtaatccttttcctaatcataaccttgaagggttcattttggaaattcatgatattgccgtcctctccaacgagatgcgctgatggagcgaacacaatcgcctcgccagttcggagcctggcaattcgagagagaccttttttagcactgtcggcctgatgtggagctatttcaccacccatcggaacatgcttttcgatcgtcttgtaccattgagggctcgtaaatcggtggattacggtcaacgagcagaggtcgatcagctggggcgagatcgtcggctcttgagtggaaataattatacgcacacccaagtgtcgctgctggcggataatggtaaggaaagtctcggtaagcgcctttgcagcgagggtgtcggccatatactgcccgctgatgttaatgaataataaccaggatacttcaatatgaacaattcaccttatgggcctcatcggccacgatcatcttccctcgggaagggtgagcgtagaggaacaagtcgatggcgatacggaatagaatgcaagcagtgctttggtcgacgaaagggcacgacaagtccaggatagtgacaccgccgtcaataaagtagtcacttgtgtccgtgccagcaaggtcgagataagagtcaagcaggtctaatctttgatatagaaaaggagtctgagaacggtcaagtttgagtgcgttcagacggccccggaagtcagaataatcgaagtagccgccgctctccatcgccatttcccgaaggatccgagtaacctgtgccatgtagagggggagactgccagattgagaaacagacataagcgaaagcatcatgcttatgttgaggtacttaggttgaagtttgaacggtcgaatctcgatattgggaatctgggagtacatgcccctgagattagaaatgtttgtgggagagactaggacgcgcagtgggaccggcggtgcatgagcatattgcggtagaacactagctaggaaggcggcttcgctgggctgcgagctcgttattgatgtatactcgtcaaactgcagcacaagagtcgatatagactggtttagggttcccaatgctggcagcctcatagagcaattttctaaggtaatatcaatgactggtgccctatgggtagaattcgaaacataccgatcatgcaagcagtggtgtgcgacttgccactcccttgcacgccgcagataaaggcagagaatggaatattcgcattcaacattattctgcaatctggggattcattccctctgacaatgtttccgagcagcatacattgagaagggagaaaatatccgaacttttctaacaagggagataccaggatggcatgctcattaagtatagcatccattgcttcttccctttgttcttcactggagctcaggaattgacactgtgcctctagggaggggaaggacggagaggcccccgtttccctcgcatggagatcgccggcaaggtggtccttgaattctattagaactttagaataccgcaaagtcagacacaaaaaggatggaagagaaagctctaccttgtagacggatattgactatgcggccaatatcattgtcgatgaccgagttcgccgcctcatagttatcgaggcctgcatcgaggtggctctgagactgttgacctgtacctatatagagcgcgttagccaaggccatttatgttgtaccgtccctctaatattttctgagatataccggatgatagaggatgctggccctgaccttggagacgggaccgctgtgaaagagtgggagcggacagtggtatgttttggacttgagctgatcctgaggtttcgatttgattgttgcttctcgacaacaaatcgagttcattcgcatagcttaggctctctttaggaactgtatatataggtaacagcgctgtacttacctgtccacaaatgccctgataaaatcagcatgattcgggctctttcccaaatattttttcttgatcgcttctcgattgatcggctggttttgtagatgacgactataaatagagtcaccaatcgccttctcgaggagagcctcagtccaatttttagattttcgtgccatttttgatagatactccaggggatgaaaagaagcctgatgaaacgatgctagaagacgaattagcagtgtacatgggggacataattatagcagtgcaaaagacggttgcagggtatgggggtattggtgcttttagtcacacggagtcacaaaagccatgattctactgcagccaaacctacaaattacttgaacgctagcgccaagtgatctaagtatgtatgtatgcatccttgctgtcactagacgttcaaggtgagtgcaggcaaacccggctgtcaaatttggtccacatatctcttactgcgacttaggctgtgcccgctcgtttggtatggtgcggtggctaaaacttaccaattcacgccatacctaggtaattcatgtgacgatgcatgcaccaacatgcaaagagcccgacggagcgcgacaagcggcgctcggttcggcgaatccagtaagggttactttggagagtggatgttgggaactatcaggcagcctaggcttagcctggccgttcccttttaggtattatagacatggtaatgttttaattccaagttgatttccaatgaacttggccgtccgtataggcacttcggagctaattccgacggtgcggcttggttcctgatctacaccagttccatatcacacagcatctgaacctttacgtctggcttccacaactcggacaagttaccggttcagcccctatcaacctgaactagatcagaagctcttctgattttctggcgtagtggcgaatgcgcaaatccagcccttgttatatgcacggccgcatggtcgcatggaaggctccgtttcgatcgtattggtatttcaagtaaagtacaaagtcataaatcatgtgacttttgcttataatactaattgtcatctgggatgaatactccctagccttttccgaggcaagaaaagaggatctacgtgtatgaggtgaaactgatttcgaacgcgtgtgtagctttctaatattggtcgggtaagttctgatgctcatgtgccatctggcaaaaagccggacccgcttggttagaatgaaaacagtgtagacagatcccaatccgactcgtcaaatcatccaaaccatagcgaatggacattcgatattcaggcacaaaatgcttgtatccatatctgcattcaacacttgattcctctggaattggatcgggcatcctatttgctcgctcgatagcctcggcgacgacaaacaaggaagtcggccaaagattctgtgcctcgagtagttttatgtaggcaaatgcgtatttgcttgtccatccacatctgtggacacacccaagagcattgatccctccaatcagaatctctcccaacttcagcctcgcgaagcccctttgctcttctagcagacctaaattgaatggtcagtcacaggtgggtcatttcacatcggttgaaacttacagaacactctgtcgcccaaaattgacctgacatcttcgctcaaaagggcaaggtaagagtcaccgtagttgagaaccagggcctttgtaatatctctgaatgcttgtgcgttcttaaacaagctcgctgcggccgcaagaacaataagatcactggctcccttattaacaggagatagccagaattcactggcaaaagttaaagcgtcaacaacgccgaatttgttcgctgcgacagcaattctaagaacatcatttacagccatgacctgaggtagcaatctgttctgatggtgcaaaattgcacaaatacatctcagcgccatcgcattctcttcgggcagtattatttccacgggaagacccgtgacgagtatatgattttccttccagtctggccctaagatagtacctggtagtttcgaggctgtcttgaggaaaattgacttcacgcggagcctcagcttttcaggtccaacaactagaatgatatcaccagctgcatcgatattcacaatcttgtcccgcgtgtctgtcatttcgaattgattggattatgcttcgcaaaaaaaaaaactgctctaaccaaagggtgcacgtaaagtgatagcctctgaccaaggaatcaattagcaatcaggttaggtgttactgggcacgggcagtctttaagcaaatattggaatgggatataaaaacaaaagacaagggcaagtgaggtttggtttaccttcaaatcgagcgtagacaaatttgaattggtgagtgccccaaaaaaggttcaaaagataacttgtgggacataaaggtataaaaggggacttcgagatcgttgacaagctctggtaaaacgaagtaataggaatcaggaaccccgatataggctgttcgttgtctccgcgtgctgactttttttcttcagcaatgctcaagacaacaccacgaagtgccaaaatataagtcctgcaaagcagctttttccgtgggatttcgtccgcttgcgacaacttgtaataagccccaaatcgcgactagttcgcttgagtgttcaaaggggggaataggtgcataataagccacagattcgtgcattcagttaatctctaattagcccctccgttggtgccaacacattggcaggggtcgggagtgaattgcaacgtgtctgagctgcaatacatactgtagagaacttttggaacgcgatcatgatagaaggaaatagaagcagaaatatcgtcaaagtgacgtgtacaatgatgggcggattaattgctgtcgaccttctattagtttgacgcatatactggtgtgttattcccatgcattggcttgccttgcttgatcgcctccacgtctgattgggcagcttcgcatacttaggcaatacgttcgttcttataatactgcatgtgcttaggcatccgcttcgcaaaaaaaataaatactcactacatttatgagaacagaaatggtggtccatggaccaatataaaatttagaatggtaaattgacagggaacagttggcccaactatttatccaaacttgtccagtcacacgataagttctttgctctaaacttagcactataatgtttaatcatgatgcacaggcactatttcctagccgccagcataagagacagcctttgggtattgtcgatttctcaaagtgtgtgggagatagaaagtctgccagctttactaatgctaaactgcctgctaattcataagtcattgatagccaacacataatgtatccgtagtagatatatcatatgtacaaccgctgtgtctgttaatgaggatacgtggatacgtagaagatgtgtatgtttggtgccttgttcgccaataatggagatatattaactagcttttcaagtctcttcttcttgccgctcgtggatgaaacagttatgggtagctgctccagctctatagtatactctgctcaatgggggttctgggtttggtaatctgttctggggtgttcatgttccgattcagagtcactaatcataacttcctcgggcgattcgatggaattgtaagggtctcggacattgcttcatgattttgttgtactttagctccgactgcatcgtctaaatctaatggcgtggccagtgtacgtaacatcctagcgtgagtccttttcccttaccgagccctctgatcccaacgaagcgccgacaagtatcagaacccttggtgagaatccacacttttttattcggttgttccctgaggctttggctttcctccgattcaccggcaatttcagtgaccaaagttctaggcatctcgaacgcagttataggagtaaaaagtgccggtagagcgcttaaaagctagacttcgatcacttcggtgcgggcttacagctggtcgaatgttagaatgggaccgctaatttttagcgcctcttgtcatccagcttatgtaacgaccaggtgatgctcatttatgattatgtaatactaagggtcgtgctcagttttactcagtgcgcaaaaagcggcaaggcctagatatcgatatttcgatgtggaatgactccaatagcgtgacaatccccagcagctctttgtcagatgattataatccagacgaacctgggtcagttccaaatgcttagaaccactagccaatttccggttggctccgagggctgaggctagtgataactgcgtaatggagtgaacagtggaccctgcgatatgcttttgactggtatatctgcagctttccgtctagtgtttgccggattcaaccccggacccgactcacagagaccaggttacgccggcttggacacgttcgagtttcaaccgaatatgcagtccagagcacacgaggtggtttgaccttttcatagaggtctatatactgaaccaatgtcactttgtaggaagtagttgaagcttggtgatagttcataggattggcgatgcaaatgcaccagaactataggccagttgttcgataggtatcttgcgagtatgcggcgatatctactatacacactgtgctgttttatacttccagcgataagcacaacacccggtttcttgcaccctccagatgtctctccaagtcgcgggtctttgctgaaacatccagtccctcctgtttctagtgcatgcgccgggaatacacctacaaccagacatcaatggtgtgaacacgatctatacaccgactacacaaaaacaacaccagagaccggcgtcacgcgagagttctggctcgatatagaccaagcaacactagcaccagacggccgatcaagatgggacctaaccatcaacggctccctaccaggcccaaccctcgaagtcaactggggcgacgaggtagtcatccacctccgcaacagcctccccaacaccgtccacaacggcacaagtctacatatccacggcctccgccaacactacacaaaccccatggacggggtagtctccgtcacgcagtgccccgtcccaccgggatatacaatgacctatcgatggcgcgcaacacaatacggcacaacatggtaccattcgcacataggtttgcagacctgggagggcgtgtacggaggtctgatcatccacgggccggctagtagtaactacgacgaagataaaggcgtcatacagctctccgactgggatatcaacacagtcgaccagctctggcacggagcagagacagtcgggtcgccggtgctggacaatgccctcatcaacggcgtcaatgtctttgggaatgacagtgacccgagtcagacggggtaccgtttcaacacctcgttcacgcccgggaagtcgtatcggctccgtgtgacgaatgtcgcctgcgatacgcacttcaagtttagcattgatcaccacattctcacggtcattgctatggatctggttcctatacagccgtataataccacagccgtgagcctggcgattggtaagctttcccttcataccaacgaaccaaccgaaggatacatctaaccaatcgaaaaggacagcgctacgatgtaatagtgcacgcagaccaagcctcaacagccaaatccttctggctccgcgccgtcccacaactctcctgctcagcgaacagcaacgcggacaacatccgcggcataatctactacacccatactgacaaaccaaaccaaccaaaccttccaacaacagcagcctacaacctaacagacacctgcgaagacgaacccgcctcaaaccttaccccgataatctcaacacccctcatcctcacagcagaagactccttctacaacgaaaccctctccgcaaccgccgcgctaacgagccacaccgtctaccgctggtacctaaacagcacctcgatgcaagggaaatgggcccagcccacgctgcgcaatttcagcgccgaaagcagcatagccgataaaccggctgtgatagcaattccacaggcagattcgtgggttcttgtcgttatcgaaacgagtatggatattgcacatccgatccacctgcacggacatgattttttggttgttgcgcagggacatgggtcctgggatggctccacgtctacttctaaattttacgctaaatctacagcccgggatcagggtacgagcaccggtctgaatctcgacttcgcggccggcgcactaccgaaacgtgatacggcgctgctgcccggtttggggtatttggttcttgcgttccggtcggataatccgggcgcgtggctgatgcattgtcatattgggtggcatcttgatcaggggtttgcgttgcagtttgttgaacggggggaggagattgaggggtttttggggggtcgtgctgttggtggggctggtgcggattggagggggtttggggatggtctggagaggaattgtcgggcttgggatttgtatcatcggggaaataatgttttggaggatggggctgggatttaatttgcttttgcgttatgaaatgaactcttggtacctgcatgtagggattattttggattaattaattaatagtacggagtagactagttacatttagggcatgcattttaggtgtacaaaggacaaagaaaagacaagtctgaaatttcaatcgagtttttctttgctttttctatttagtttctttgtattctagggatattaggatgctcgatatctcgtatttagaaaaacaaatacgaagctgcagctactatcacagagtggagtatacaaccctagagatgtaggacctacttagtccggttagtccgagcgactactgcagcacacgtactttaggggaaattcactagcaaagaaaggggaaatgctaggtagataggaaaagccgtccaggccaatgaagaaaaaaaaaatagtatatcgtaatcgtcgccattcattgaaccatcccacctaaacataacacatctaagccatctgatctagaatctaaaacacatgagcgatcagctcgaaaaatacaaaaacaaaaacataatccgaagaagcgatgcgcatcttctatacaagaccgattcataaccagaatgcgatctaaggaaaaacaggagtgggaatgggaaataagcaaaacagaaaagaaaaggaaatacagtcatgatatcatatcgtaaacaagcccgagggccagaaggtaaaaggtaggaaacagcgcaagaagaaagaaaaaaagaaaaaaagaatgcagaaggcatcacactcatgagatttgcttcgcagagcgcttgcaggcaccgcgcttcggcacgtccatgtggtggtacgagcgcaggtgctcgacgaggtggtcctggcgcgggaagccattgctacccttccgcgagcagtgctcgacggggcaattgcggaagacgggatagtggacgctggactggtggcgcttcaagtctgcgaagcgggtgaaggacttgccgcagttgtcgcagccaaagggcttagctggtctggtggggagatgttagttggttcaaggcgacagcacgcgcgacggtagatggatggtcggcttacttggatgccggcgctggcgattccgcgttggattcgtattcgctgatggggtaggttggtagcgcgatgtcttcggaggggaaggtgaagctgctgctatagctactgctgtagctgctgccacagctgctgggtgtgctctggggcatggtgggtcggtcaaagaccgggtaatcgtgtggggtttggtaggtgtagggtgagctggtgacgttgtatagctctggggtgacctcttgcatagggaagggactggttgcgtcgaggtcgcagagggaatcgtagacgggctggccgccgtagaagaagaagtccatgctgcccggtgaggaggagtaggaggaagagtaggagtctgggtagttgaatggggactgcatgttgatgttgatcggggaggagagggagcgatgggtgggaattggaattgcagtcttatagagagagagagagggttagtctaaaatctgccatgcgaactaaagtcaagtcacctaccattgtaagaggtaaactaattatgttgtaaaggttaaaattgatttggcccagtatttattcaaatgcaaaataatttccccccgttaatggagacatcagcccttttatgtgcccaacacgaaactgcatggcagggggtgttagggtattggccaacacgggacactaacaacttctagaaaccttctcgaagcagactggacgacaccactcagcctcggggatttgctgatcttttgctaacgccgaatattccacggcccttctagcgtgtccttcccccccctctcatttcacgtaaccaacggtgattggcggaggatccggtgtcgaagccaacgaggtcagttagttggctgcgataagcagttgggtgcccagagagtttccccctcacgccgatcctctcatgattggccgttggcgggttctgtgcgtcttccgtgtgtcttctgtgtgttctagtgtcattctagcgtgccaagaactcgtgtctgacatgtttttttggttttgttttgttttgtttccgtttcatgtgttgcatgatgtagtgctttgtgttggaagtaattgtattcgggctgaagtcagagactcagagcaatatcaattcaatatcaacttcaatatcaatatcaaagtccacttcaactcaactcaaccagctcaactccacttcgactgcccaactccagacatccaacctggtattgacgtatatcggcacaacggcacaatcgtgccaattacatcaccggatcaagatccagccttaacccgaacatctccattctccatctccacggagaacttggtcgtctaatattcccacaattcccaaacccctccaatccggggtcagagatcgaccgatgatgtcgcggtcgcgcacagccctgacgtagcatctactgactagcgttcgcatatccccggcttctagaaaggacaaatcccgcgctcgagctgaaagagcccatgcatgcaacccgtaatgtatagttacggagtactccgtaactagccccagcgaaatgattcgtcatatgtcgctcttttgattttctttattcgatttattctcagtcggggatacatgacattgcttccggtcgtgttgttgggcaaccttggacttggcttttatgagccccgttgcctttttcctttttcctttttccgatttccggtttttgtcgcatctcgggcttatactgatatatttttttcgctattggcttgcatgcacttgcatatctcctgcattattgtcccgggatgggaaacagtactccgtagacctgcagacctacgtgtccacgagcaaatacgataaccccggacgatcatacggagttcccggggtatggaattaggtacttatgatatctgctgatccagggcctggcccgtacccgtacctgcaaggcagactgcgcataagcatgctatgcactggacttggctacttggttacttggctgagccacttgcctacttctgtaatatgcttgacttaaggattcattgtattcgaacaattgataaccttggaaataacacgaaactcccgtatcaccgaggcccattcattgcactcattgatgccagtcctgcgaaaacagtaaaagaagagaaaacacgcccaccgagaccccacagtttccagagtacccgccatagcctcaaccatccagtctatcgaaccatagccgcaaagccaccgatagtgtaaacgaatccagggtgaaaagcaatcatctgcacttggagacccgaatgggtggctcacgagtaaaaaaaaaaaaaaaccaaagacgcctcataactcgtcctcgaggtatttgtacacaaacttgaaatcagccttgcgccgattcatcctgttgttattcgtaagtggtgagctcgtcaagtgggtgagcaaaacgaaatcagtcggattctttaactgaccatgtgctttcgtagtcgaagaagcgataggtgccttgttcaaactcctcggtaatgttcttcggctcctcgtgacgctggaaccaggtttgatactgcttgtggaagcgccagctctggttgcgcagcgccttggccgcgagatattgctggtacgtcccttggcggtagtagaaaaggtagaagagggtatccgtgtcgattctcccggtatcgtacaaccgagggtcatcaaatattggaagaggttcctgtggatagtagagcgcagtgctgtaggggttctgcggcttgtagtgacgtggcttttcggcatcgccagcctcgggacaggtcgtcaatgaggtagcgagaaggcgctggaccgacggcgacgggttggccgacgcacgggacttggtcacctcaaatgattggagcaggtcctggagaccggggggcaggtggtagatcgattcctcactttcggtttcttctgtctctagtttaccgttcgttgatgtctccgcctttgcaggcgcgggcgataagacacttgcactcacagggaccttgggtcggacgtgcccagcgagctcttctgtaacggcggctacagtgggtgggattattgacttcataacaggctgtactgacgccacactgggcgaagcagtggaagacttggagataggtagtgccacggacagagccgggctgaaacccggtgggggtgggagagggagaatgccaacaccacttttgtcacttgctgcggcagcggcagcggcagaggcatacttgagggtttcaccagggggacgggtcggaaggggagcaggcttcatgcccggagcactcgaggaagcagaggggtggagggtagcaagaacaggaagcggggatttcatctgtgtggacggtcttcgggctgctggcgcttcttgcttgaccttgggtttcggttcgggctcttcgtcttggattgattgcgcgtcttgtgatgatacacgatcaccttcgccgcccatgccaaattgtgcctcgatctcctcgccgatatttagatcgtcgtagagtgtttcatcttcgccggagtagtcaagactgccgccttcttcgacgtaatatttgatactttccttgagatcttgtaccgcacccacgtccaggttgccgttctgtaaagaacgattgaggaattccaacttgttgacgtgccatttatgtcgttccgtaatatgggagatgtcggccagtcgatctgccttcttcgtatccttcttccctttcttcatttgtgcatgaagtgtttcctcctctgcttccaaggcctcgatcttcagctgaagctcgtcaaccatggtggagagaaactcggaacactcgactctctccttctccttggggtcaagtcgcgaagctgccgagagaccttccttggaatatgctttcgtcttcatttccttttcgacggctttgaattgttccatgcactaccgacaatgttagcttgctgtcctcaaccattggactctgcgggggaccaagataggaaacccagacataccacttcaatcgctttgcgctgctccatgagtggggctttatctttgacctcgttcccagcagcccatgacttgatctgatcacggaatctttgaagcttcttgatctcgcgcttaaggtggtcttcgagcttatcccgttgcgtaggattcgtagcctggcggatcttctcgtaaatgccttcaaacgtttgtatcccttcggagaccttcttgaaggttttttcaatttcctgttgtgtttttcgggctgccattgtgaacccggtggtggactgtgccgtcctggcgtcggattaatgcggtcggaacggggagatgatgcgctttcgaccgaaatggtcacaagtacgaaattaaggtagttggtgaaggaagaattgtgggaagaagggtttgtttgacagtaagagggacacaggctcggaagtccatggaatacctctccgcgtttaagtggaaagcttcgtggatgctctaataggtaggcggtcacgggcggaggcaaacgtgagggcggcgcgagggggattgtgggcgttagacacacaagtcgctcgtcgcatttcaatttctcagtgggaaagaacacaacttaccacaaagaaaccagtcgcgctgacaaactgcgtcaaacgagctcattttggcaataccacgcatttgctgccagcgctatcaccagccttatctaccgcaactgcgtaccccggctttagaagctgtctctcattttgacacatacaagatctgttggaaatcaagatgaaaggtgaggatctctgtacctatactatatacaaatcaactcaccccgttcagtcatcatccaaagagtcaaatcggcatccgtgacagtcgattcggagctagtctcctctattggcaagggccttcttgtatttgctggcgttggcaaagaggataccgagaaggaagcagagaatatcgtgaaaaagatactgaaggccaagttctggcccgatgagaatggggtacaagtaagtcaatggctatcaggtgtgagaccggcaattgacatatcacagtggaaaaagaatgttcaggagattgagggagaagtactatgtggtatggctcttcatcttactctccagaccactgctgaacatgactagtctcccaattcaccctctatgcaaaaatgaagaaaggcaacaaacccgactttcatgatgcagctggccctgaagctgcacgcagaatctatgacttcttttatgacaagatgcgggaaggttatactccagaccgggtcaaaaatggtgtcttccaagccatgatggaggtcgaattgaagaacgacgggccggtgggtgtgaactactgcagcgaggacgcggcggtacattttgaccttccagttcctttcctcgccttcattgattatatactgacttggtttcattctaggtcacaatcgaaatcaataccaatcttcccaaaaaggaacccaaggagcagaaaaatgacgacaaggataaacaggacatcaagggatcttttgaattccaaattcccccagaattgctgcagtgaaaaaaaagaaggagagaaacaaaggaagattaatagagattagagtaatgctttgtacttaaacgttagcagatacccccaatgcaacttctatacaatcccgtggtccaaatatagttggggtcaatggaagcttcctgaaccacaagcgccggactcccccacaacgccgacttctctctcctccacttctctaccatatcaccttcatttctctctcgtattctttttcacctttgaaatttcttccccgaaactccacagtcatggcgaaacctcagcgtacgttcagtgcggggtccatctgcccgcggatgcaataattgagtcgagtcgctgacaagctcgtaggctctcgtgtcttctttgacattcaaatcggtgacggcaagcctagccgggttgcctttgagctggtaagttgcccgcatcctctatatgccgagtctggattgcatctaacatccgggtgttgcacagttcaacgatggtacgacatgattttctcccttgacatttcggacctgactaacagcaacagtcgtccccaagaccgcggacaacttccgagctttgtgtaccggcgagaagggcattggcacccagggcaaggaattgacctacaaaggtacgtctacaataccccgctcccatcgcgctgacgcccactaaccgcggtgtcccgatctaggctcaattttccaccgtgtgatcaagcagttcatgattcagggtggtgacttcaccgcgttcaacggcaccggcggcgagtcgatttacggcgaaaagttccccgacgagaatttcgacctcaagcatgaccgccccttcctgctctccatggccaactccggccccggcaccaacggcagtcaattcttcgtcaccaccgttcccactccccaccttgatggcaagcacgtcgtgttcggtgaggtcatcaacggcaagaacgtgattcgcaagatcgagaatatgaagacccagtccgacaagcccatccaggacgtgaccatcgtgaactgcggcgagcttaccggcgaggactacgagaacgcggccaagcgccaggcggacgcgacgggcgacccatacgaggacttcaccgaggaccaccagggcgaggagcttactgcgcctctctgcttcaagatcgcttccgacctcaagggtttcggaaacgctgctttcaagagtggcgatctcaacctgggtctcgacaagtaccagaagggtctgcgctatctgaatgagttccccgatcccgcagacaatgaccccaaggagctgggcgagcagatgaaggcactccgattcaccctgcactccaactcttccctgcttggtaacaagctccagaagtaccgccaggctcagaactgggccacatatgcgctccaagtcgccgatgaggctaaggttaaggatgctgatagggccaaggcttactaccgccgcgctgttgcccacgagggtctgaaggaggaggatgctgcgctgaaggatctgcacgaggcagagaagctggctccgggcgatgctggtattatcaacgagatcgccaaggtcaagaaggctgtcaaggaccgggaggccaaggacaaggcggctgccaagaagttcttctcttaaacggtttgaaattgattcatcccggcctttcttttgttccatcacgattcacgacgtggtcttctcgttcaacaatgacccatgatgtatgatatcacatcattcaagcaatttgccttgctcttgtgcgaagtccatactgtaacttctttttacatagtagactcctgtcgcatagcacgttaggctcaggtgtaggattactcaaatcatcggggataaaagttgccccaaaagtatcaaattatatatttccaagtatgacctggtagtaacgcactcatattttctagacggagcattgcaaccaggtctaggcgacccgctatactaatgataagcattagcctgtgtttcagaatatattggctactgcttcagtcttgtcgatcatatgttttggatcacgcctagtatcgccttaggcgtttcaagtcctttctcttcattttctgctcggattttaaaaatcaggcaatgagcaatgcagatatccactatcggacgttttatctgagacacagttggggctgatttaggtggcaaccagatatcgtagtcaaccgtgactggcagactacacagaaccttctgattggaggccaggtggacaaatatcggaaaagccaagaacaatcacatataaacagatcgattgaaatatccaactaaaccaaacttatatatccaacttctcccttcattcccatcctacttggactcaaaagcgcaagttcccatctctagcttgaccacatccgcctcaggccgaatatcgaaatcaaagatatccatcggcaccgaaagcgtggtacaagcattcggaatatccacaatgccggcaatatgcccctgcaccggcgcgcagctgagcagcaaatatatctgataatcactatagccatagcgccggagatactccataacccggagacaggtctgtctataggcgactgtcgcatccaggaaatgctgcttgccatgctcgtcgacagagaatccctcgaacgtcaggtatcgcccagggccgaactgcggctctacaggtcctgcgtggaatattggtgacttcatggctagtttcgccatgccgtctttgatgacggtgaacttcaatgtgatcacaccggccatttcaatcgccccgcagaatgagatctcgccatcgccttgcgagaagtgcaggtctccgacggagaatttggcgccggggacgtgcacgggaaggtagactttcgatccccgggagaggttcttgatatcgcagttacctccgtgctcggggcggccctagtaaacgtgtgagttttggttcggttttggggtatattgtcatctctcactgggatggttcgagcaccctcattcgcgatcttgctcttcgcgtcatcaatagcactgcctgcatgggcattctggggattcggtggttgagcgacaatttgatcggcaatagtattggctgcaatgagttcgccctctcgacgattccattcagccagaacttcggccgagggagcacatcccagtattccggggtgaatcagtcccgcaaaccgaacgtgcggaatatgccgggatgagcagaagattccttcaaagtcccagatcgcctttgctctgcgatgccgttagcatggatacatgttatgatattacatataattaacatacgcctcgggatacagtcggtctaggaaacctcctccattctctttgtggaatatcccggtgaatccccacggctggtcttcgaatggctggacatcctggatctcgacgagcaagacatcgccaggctccgcggtttcgatgtcgaatggaccagagaggtaatggatttgggttagatctacattcctgatatcgtctgctgagtcgttgtttccgatctggcctccggtccaatcgagacattcgatcttgacgacttcattgttggcgatttttccatgagccggaactggacgtggaattagcatgcatgtctctaatgggaatatgatcaagggacataccatctggatgccatctgttctataaggaacttagcaatatcttacgacttcaagaacgcaagaacatacatgtaagccgggctgttcccacgcaggcttgtcgaggtcgacctttagagcagtacggattcccttgatacccatatttgcttttatccaagggtttgttagttgttcgacgtggttgaggcagtggctgtaggctaacaagagtataatctcgggctttggacaagctgggacccttaaatagactgccatatcccggcccctcttacgataaggtcttgccccgcagacacccggtccattgacatgttggcgtgaataacagttacgtgaggcgttggagaactggcttatcgctttatctcgcagatcaccccgacctcggggggtctgataagcttgtacttatgtacccctcagggacaattggagatgaaatgtatttttgtaaacaaggcctatttcggagggcaacaatgcggggatggtcgccttatatgctaataattgatggtgtctgtgcaatcgcaaggccatatatgctcgaaaaatacttgccgtgaagtcttagtgctgacagctctcaagaaaacctctttccaggagagataggttccttctggtctggctcgtccgtgtcgacattgagtttgtcaagattatcgagagataagcgcaagaaatcatgcttgttcttccaggtaatctggctttccgcgaaacctgtactctcagcaggaggtggaggcgggtcggttatcttggtgacaaggtacgctgtagatgcctcagcaacgccatacatcagcacaccaatgtacgggatacgcagagcaaccgtgaaagcaaaggcaaagccaaagagaacaccttctcgatcgctgaaccaccggcgcttttggtcgggggtgaacttaatgcgccaaaagtagggttcgagctagagactgttaggataattcaagtgcggaagggtaacttgacttacaagctcacgcatcagactgcgtgaagcaaagtaggtgtgaagaaaagtgacaatgtaatgcttcggcagaatcaaccctatgccaaaaatgacagccgcgggggtggagccgatgtggcttcgcaatgtgtagaaacttgctgcaggcataacaaaccgaccgatgatcgcaaccatcgaaagaagatagacaccaagcattataccaatcttctttgcatagcggttgaagaatgacttcagtgctttggcaattggtcgagaaacgctggagccacctttggcagagtactggacaagattggggtagtatagagagcggaggtgacgggggtcttcggatttatgtttctggatgtatgtagtgtccacccattgaatggactgcatgaaactagtgagacggtcagcgaagtatcaataagttggttgctaagagaatgtacatttcatctagggtgggcgtcacatatcgcatcaaggtcatgagcaagaatggcacctgtaggacagacttggacataaattccaacccactgagaagcttttcgtcccagactgcctgttcaaggttgatcacccatgatacgaggtatatagagaatttcacgctgaggatcttgagttcaagtcagcgaaaaccctccgtgcggggcagtatagaaacatactggaatctgaatgatcaattggataacgatgccgatggctatcgcaagagctgcttggcggaaatggtcgtacttgaatagttcagggtttcctaatgcacgaacagctgcaaccctcagttagtaatggcctagaacgcgttcccatccaggggatcattccaaggcaaatgacaagatgtggctggttcaatgcagcacaagcacctgatcaatgttttggcatagccgactccaacgttgatagaatttcttgtgtagcctggaatccgccaaggtattccaacctaattcccctggacgttcggggtaaacacatggggtgacatactgcctactattgtgagctgaaagccgcggatcacagcgttcggctcgaagttcgacatcgttgctttcaatgctgtggaagaaccaagtaaataccaccacgtataaccccagaagtgtcgaaacagttaagaatctagcaacaacgcattcttgaaaatgagaccaaaaataactgtgggtgcctgctcagctggcattgaaagctgcgtcatgatcacctgatctcggcctaaggcaacagtgcatctccccgcgcaataggccgcgcaactgcagataagccccatctcctgcgtctcctgcatcggatacctggcttctcacattggtattctgtacaaacatgtttgtacattaatatctcctttgccccttatcgatcgcatccatgaaccatgcccgagtctccaagtgagctacactctctccgccgctctgccacccttccaaccaaattaaatcctctcgcccgacgtcgccccagcctgcccgaaaaacccccannnnnnnnnnnnnnnnnnnnnnnnnnnnnnnnnnnnnnnnnnnnnnnnnnnnnnnnnnnnnnnnnnnnnnnnnnnnnnnnnnnnnnnnnnnnnnnnnnnnnnnnnnnnnnnnnnnnnnnnnnnnnnnnnnnnnnnnnnnnnnnncccgcgcgacggggcgcgagcgtgccgaatacccccgaacatgtaattttctatcacccatccgcgaaaatcgttcatttctccccaagagccctcgcccctatcccatccagttctacgccgtccgacttcgactacccggtcgatactatcgagacactcccttggcgctctgcaactgagcgaacggtcgcaacagcgccactgaggttagagaaggtccatggctcgacagcgtttctgaaatgtggaaatgttgtccacgcaattctgaagaattcgcagtgttggtgtgtcgacggggtatcgaagtttgttctacgcattcgccctcttacatactatcgcatcgaaataccatacgagacagaagagcaccggagtttggtgcgggatctgaagatcgcattgccaacagtgcttcgatatgaagtcactccatgccctttcaaacgctctttcagcgttgagctcccgaacgacgcaatggcacctcggcgcaaaaaggcttggcaaccgaaagatcagagagaaagagtaccgaccgtcctagaacctccacgagagacaccatcaccctcttcaataaggtcggattgtctcgattccgccagtgccggggatgacaccgacggagacctaaccgatgacagttgtttcacttcaaacaaagcgagcagtacaattttggagactattcccgacgatcgggcatcctctcccgttgaggctttgagtccttctccataccaagggcctcctaggcggtcggtgactgaagtaccgcaaactttcactagcctgcttgcaaagtttgaggctacgtcaggcgcagacgatgaatacgatattgatcctttgctcaagccagaatgcgcatctagtactgatgctgcacttcaaattgatcatgagctcaaggttacagaccaactcgaacctgagtttgtagccgatagtggagttgaagccggacctgaatccgaagctgtcctagattctgaaatcaaagccgaagcggagcttgagatcaagtctgaactccttttagaagctatatcaccagccgaacccttcaaggaatctgcagttgaagccgaacccagcatcccaattgagactgacgcagtgttggcggctgaaacttcagacgaagttgtattccgtgctgaaactaccagtgcagtggggactaaggcagtgctggaagacaatctcgtgaatgtcgaagaagttcaacgcgtgcaacccactgccaagctcacactggaggtcgaccatgatgcatcctttgcgtccagtcccgagtcattccattctgctgagccacaatcgccggattcagtctctactcatcctacatctgtgggaggccccgatttgcctgaatcagaagagatttccaacctttcgagcataaagcacattatttctggattggaagcgtcagcggatcagtgtaagatgccacagcccccaacactcggtattcctcaaagcgacaacgttcccaatccaaccagcttgcttcatcctccatcaatgcatagcataagctcgaataatgtgcctaggcgcttcgcagatgcgttcgcagacacctcaccctcaatggcccctacaaacaatggacaccgacccagtcgttttacggatgtatctgcggacacggaaccgcggccaaacattcgtgccaaggtcgctgctttgaacactgatctcgaccacatgagttccgagttccggcgccgggcaaaagccacaagagagcgtgacgtttcccctatgcctcattcttcggcattgtaccagccatctagtgatggctcatcatttatttccaaggctatcaccttagtattgatccccccggcctatctttttgtcattctccttcatatcgctgcgcgcattgtcatccacccaaccattcagccgactatcagctccccaccgagtgaaccaaattctcattctcagccaaaaaagaaggatccagccacagaggatgacttcagctttccactggaacctcaaacttcctcggaatatgaggatgctgaactcttcagaaaactcgacccttgggatctggactagttgggtggttgaaatgcccccttttaatttgcttgctctttttttcttcttctggatcttcgtcatcctacgctcggtttaatgcttactctttgtattcctccctctttacaccatcttaatgtttctcttgttatgatatttggcgctgattttgcacgactcatgggtggatatatgacatggtttgtattctactgaacttctgtattctagcgttacgtgtatcattgaggtgaaatccggggtcatgtcagaaacgaataattaattgacacaaatacgctctttcaatttccagacggttctattccatccaacgccattgaccctctactgaatctgaccgaagtcgtcagagatgaaacctacgaataggggcatgcccaactgtaatgctataagccgttcatttcttttcccgtcccacaggactcgtataaacagacacgcccgtgagccacaagcgtaggggaatatgtacacttgataggaaattcgcattgaaaaagcgagaagaagaagccagaaccaccatcgaacgccagctaatgcatgagaaaacgaagccatgacacacctcgcttgccaggtccaagtacacaaagacgaagatgccatttgggaaatagaccgaagagcaaatctatgcttttgtgaccttagcagctccgcccttggtcttggccttgcggcctcggcgatctcgcttcttcaacccagtcattcctgtcttgcagacctcggcatagcgaacgtagaaggcctcaatatcatcggggctgacaatcgtcgagagcttgacctttgatgcccttttcatgctgatcttggttgcctcgcttgcattcttggggttcggtgtattggtgtttccatcagttgctcggatgaggatagatggttgggagtttgtggtagtggcgccgggcacatcgatgagaggtttttgagtgagattgaccgagccatgaagattttgggaggttttggagagcagatctgcaagagatttgaagaactaaagatgatcggtgttagcgatatagctcggaactggtggtcgtggtcgcatgcgcggaggtgtagcggtcaggtaaacaccaatatcaatatttacctcgtcgtgtcccaaatgtggggccatatttagagatcttttatgagccgcgcgataattaaatgatccgaaagctggagcagatgatcaatatacagttgacagctgggcacaactcacagtgggggagaaactccgctgtgggtgcctctccgcctttgttttggggcagcagaaaagtgaaaaaagttgtctaccgcccggcgtacctgatagagacatttgaactcttcaagagcagacgaaacatcccagaggaccaagatgcccaaaataccccgccctcggcataatacgacggccttgcctcgggatctgcgatccgagctcggaatccgcgatgtctacggtgacaagaagcgccgcctcaatggacctgcctcgcgcaaagaacgccgccaaaatgagcgtacgcagaagaaatcccgacatgcagccccgccgaacaagaagaccttggagcatccgcagcagcgacttcagcagaaacctcgacagcaggatcaggaggaaagcgacgaggacgaggatctcgatgatatggatctcgacgagggtcccagtgtgcagacaaagtccaaatccacgaaagacgccgcgaagaagcccaaatctattctgaagaaagcagcagtcaagcaagactcagagtccgagtccgagtccgggttcgggtcagaaatcgacctcaatgaggacgaggatgaggatgaagatgacgagtctgaagatgagtccgaagatgagtctgaagacgattctgaagatgacatcttcgaggatgaacccaaagaaaccgaagcccacatcccaggatcggtcaagtctaaattggcgcaagacgatgctgagattgctgcattggagaaaaagcttggcctcaagaaaggaggtaaactaccaaaggcgtttgaggaggatggactagacgagttgctaggggatctgggtggcggcggcgatggctcagaggacgagagcaaaaagcgcaaacgagaagccgatgaatggctacgaagtaagagactcaaggccaagagcttgcaaacccaacaactcgaaaaagacgacagtgaaatggatagcgctgaggatttcgatctcgacgacgaaatatttggaggcgatgacgccgaaggcagtgattttgatggtttcgacgaggaagaacgcaaagaaccaaaaaagaaagaaaacccatatatcgccccggtcacgaagcccgaacccaccgctcagaagtatatcccaccttcattacgaggtcgctccgacccggaaagcgaatctctcactcgtctcaagcgccaggcccagggacatctcaacaagttgtccgaggccaatatgctctcgattgttgccgaatttgagaagctttaccgcgattacccgcgccaacacgtcacatctaccttgatcagcctgctaatgggtctaatttgtgagagggctgcccttcaggacaccttcctcattttgcatgctggtttcattgcggcattgtataagctcatgggaatggacgttggcgcggagattatccaaactgttgtcgaaactttggatgcagatggcgacgagcgtggaaagttccagggaaaagaagctactaacctggtctctcttctctcgcaactttacaacttccacgtcatcggttcttccttgatgtttgactacgttcgtcttttcgtgcaggagatcacggaatcgaacaccgaactcttgcttaaggtgattcggagtaagtgatatacctagcccacgataaagctactagccatctaacatgtcgcagattctggccctcaactccgactcgatgacccgtctgcactcaaggatatcgtattgctcattcagcctgccatcacaaaagtcggcgaggaccgtctgtctgttcgaacaaagttcatgatcgacctgatcacggatttgaaaaacaaccgctcgaaggcttcagctgcagctggtgcaggtatcaccacagaacatattaccaaaatgcgcaagattttgggttccctaaacaactcgcggacgattcgcgcatccgaacctattaacatttcccgtgaagatatccacaactcctctaagaagggcaagtggtggttggtcggcgcaagctggaaggatgatccccttgtgacagcacagcgagagatggctggtgtacaaatgccccaacctcaggtcgaggatgatgacagtgacggcgaacctgactttggagtcctcgcccgagctcaccgcatgaacacagacgttcgtcggtcgatttttgttgctatcatgtctgccaatgacttccaagatgcgaatgtccgactcatgaaactccgtcttaagcgggcacaagagtttgaaatcccccgtgttctcttgcactgtgccatggaggaggaggcctataacccctactattctctgattgcgcgtcggatttgcggtgaacagggtcgacgcatcaaagtgtcctttatgtttgctctttggaatatgttcaagaagatgggtgagcgaggcgatattgacgaagacgaagacaacgatttcgatccggacgatgaagaaaacggtgttagcatgaagtccgtggtcaatctggccaagatgttcagcgccctcatcatggacggcagcttgacattgagcattttgaagaatctcaacttcgcctatctgcagcccaagactaagacgtttgttgaagtcttgatcatcagcatcattcaacaatctcaaaagtccaagacgaagaagaaatccaagaggtccacgccagatgagcctgagaagaatgaagcggctttgatgcaaatcttcctacgtgtcaaggaggcaccgcacattgccaagggccttatcttttttgtgcgaaaggttgtcgcaaagagtgatatcgtgtctcccgaggaactaaaactagtccggtggggatgcaatgtggctacagatgcccttaaggctgtggcggactaaaagttgcattggattcatcttgcaattgcatatagaatatacccaatttgttacgctgctcctgatttgtttatgttccacgcttgtcccgaacttcgaaatcgccattgctcatttcaacaagagaagaatgaatcagtgatgtactctgtaccccgtacggagtacaaatccagcatttccaatgttcacctatcctacttctactgttcgaaatatatgaaatttctgggctagacttccaaataagacggtaaacagaactggtggaatagtaaagcgaacttgttgagcatttccctccacgaggagttctgcataccgtcattacaattccgatatcgggttgtttattgttggatgaacctaaatcatctcttttgcctggaaaaatgttggtcgttgagatttgggtgtttcacatggaccaagggaactttatgttgtcgggacataaatcataagccatgataagaacttgtatgtaagtctatgaaatataatggaagggaaatgatacacctcccttataccgatataaatcgccgttagtcattcagctgctccaatgaggtcccattccatggctatgagccagccctcttttgtctctagagatgcgccattgtcagatggaccacgctccgaaacgtaaccagatacctgaccaggtgaccgacgttcgtaggagtcattcccgagctccaaactccagttgagccctttgtgaatccccactaaatccccttttcgcagttggggtgttgtaattgcatcagaacgcgagggattttgacgcacgacggatttagatcgggaagttcccataatcatgatattcaagacaggatcaggatttctcccttgtatatgattcccagtaagtagttccgcttgaagaaaggacagagagccacagccactcatagatgactggctgacatgaataacacgcgcagttaggagatatgcattcggcttttccggcgagtctgaggcctggcccaagggaggttttggaagctggtcacgtttcgtccccatttctaagatccaaccgcgtgcctcagcggccattccgccagggatgtaattggacacaccggctcggtttcgaccacggcgatgcagtgtgcgcgaggaaggagagaagggtgcagggatatcctctgcatccggattcggcgacggcgagcgaggcaaaacaaaaaccggttttcgtctctcagacggcgatatgcctggttcgtctagtttgaatctgggcgcggactggctgctgggaggcctcgccgccgaggaaagcataaatcgaggacgactgcggaatggtgttttcatattgcttggggtcgatgcggcttgtgcaaatagacatgcactcggtgcgggatttctctccatacccatgtcccatgccgtagtgctttgcctgcttttatcagataaagcgatgggatcggctggaggatccacggattcgggtggtgatgacaatattggatcgatatgtgtcagatttcttcgatgggagggtgccaccccctctacacgacgccgtttattcccatccctgaccggcgaaaacagcgcgtcgaactcagcgtccaggattcccggagtctctgcttcttcggggggagtgctgtttatggcatcgtctggtagttcgtccgcatctctccctccggtttgcacatctcctatgcctgcggcatcatcagagtcctcaatcacgtcgcgttgttgacgcgagccgggggcagtttgggtaacaggcaggttactcgcgactttacgcgttgaagatggcccgtcatcatctatgagatcaagatcatcatcttccttctgtgcgacactttgtgatagtagaaaccggggtgtggaggcgaactgagggccactgcggcgcgtggatgggttgcgacgggcgaggcggaatggtgatggagtctgtggccagtcacattagcctggggattcgataaatcacgccgtagacatactgccgggaaaggcatttatctaaagtatcagaattatggagcgaacaccatggcgctgcttcaatgcacccagtcggatagatctgtagttaactactccgtacataaaaagcggactgatttctcaggcatgtaaacccgcttgtgaattagctactaaacctatttaggaagtaagttagagcttcagttcatatattcttcactccaggcattcctccttcttttatcttcttttaccaatttctaatatctgagctctgcaacacaaccttgcatctgacatctctttctttttttccctttcttaaactcaagtctcaagtgttcacaactcggctcgtccttcttgtcctcgctcctatctttgacctaactatcagatccctgctcttgtggcctgtgatactaagacaccatcctataatgttttcaagcaaaaggcgacgacctaacaaagaataatgaacgtgatcctcgacttacaagatcaagcgcacaagctctccttctcctagctaaaggcgtcaattgcagttctcgcatcaacaattcaaggagaccagtccgagctaccgacggttgcaatttctcctttgaatctcagtgatgtccaagttatgctcaagttgaaacattcactgagcaaccttgagttccgcaacaaacttccggttgagctgtctccgatctgtggtacgtatcccttagggaatattcaaaataaatcagtttactctcacttatctttcaacttctaagaggtattatactgattaatcgtcacttattgagctatatatagataaaattcagagaaatccaataagagttatagagatcagtttgtttgcaaagtggtcagcatcagtcattctgcacgtgacttatctgagcatgatcactgatctaaacccgtgctgacatctaacgactcagtgaggctgagcctcggcaccctcataagagcggcggcagcacaatcaaatatgaaagccccaccccagctccggtatgtataatgacataagtctactgaatgtagacgcaggtgaacagtaacaaccaatggatataactacctgacgaattatcaattagggctcttaaatgatatcgatattccgatcggcgcgacttggcattaaaagatttcctaccttttttacctgtatccctgaccgcacatttggcctgtcctgtgaagagggatcctagatttgtcaatatgaagtaatctaaattaagggaattgttgctcgtactagatgcttagattttcagtacagccttcctactttggtcgagtacctgccttaacacttgcttctccctactgctctcttaccgcttccaaatttgtacgcggcaaagtacggcagaaatttggcagaattatgagtggtaccagatcaggaaggcggcattggaatttcaggccgcggctgtgagcattagtttctcatgattttggagcccataggataaaaccccttggtcatgtgacatacacacacgaggttatgatttaattgcttcgctttgctccgccattactccgtactgatactaaggataaactttcgcacctaatcgtgtcgtgtgttggcgcctggcaagtacgttatgtacacacatgtatggttgagatagctgtcttaccgccccctctgtcccacataacgagagtttctcacaaaacgagagtttctcacaaaacgagagtttctcacaaaacgagagtttctcacaaaacgagagatttctctttttaggtatctttcatatggtatacccatacaaaaggtacataaacatgaattagagattttgtcacttctaggaatacttacaaaaaatatggtaggtgatatatagtctaaaggaggtctattttatttactattaatatattaggaagaaatattgagtattctccaagtggtagaacgttgatgtttctatatacatctctttcgtaagtctttacttttctgtataagatatctgaaatttattttattagccaattagtttaactataaatttattattgatttatactcttatttctcctttaactagccaaagggtcgagaacatgatatgaggtatatgtaccttttgtatgggtatgccatattaaagatacctaaaaagagaaatctctcgttttgtgggacagacccacccgccgttgatagggtggagccggtcttattcttgtaatgccaagatcggaaaatcgatatcatttaatagccctaattgatgattcgtcaggtaaatcgttggaggagtaattctacggcagatcttctactttctagttatatattaatagagtattaatcttcttcatatccattatcgattcttttcataatccgaattgatcattcgtctggtagttatatccgctggatcgggtcgttactgttgacctgcatctacttgcatgctgtctgggctactttgtcagggctactttcgaattacgagtattaaaacttacttatttaaacccttcccagctcatagaacttggacatgatctctctttggaatatacccatcttccaaagctttctctatatcgacttctcattgtctttgtggcttgattcatttgctttttgtcaattcctttcgtcatgacacgcgctttttccaacgaccatctcgaatctttccctgttgagagttatggtctacctcacagtatggcccatgctcaaaatacaccccaaggcacacttcactatctcgaacaggacctcccatttcaaagttctgtctatggtcttccatgggccttgaatgacttcgacctaaacatgccaattacatcggcacaagccaacatcgagtctcttactggatctgttagagacaacgcctccccattcggagcagagaacacaacgaatagtgcctggatggactgtgacagctctgctttggatggctatcagcaggggctcttttcgctcccagcgggagaaccattgaatgagacaccctgtgagggcagtccgactgatgaccgaacgtctcgtaggcgtcgctctaaacccaacgccaagtgagttcctccgatacagatctctacccctatcccatatctgtgtttatctaatcaatcaatcctccaaaggagcagcactggtcctgtcacatgtggttgggaaggttgcacatacacactcccgttcactcatgtgatatcgttgtggcggcatatcaaggacaagcacatattccctgatgcgttcaagtgtccctctccacaatgtggaaaggcatatggtcgaaaggacaagttgcagcggcatttgcgatcgcatgcagacgcggaaggtagaggtaaatgtcgttcgtgccatacatgatagtacaaaggttattgataatctcttgtctcttttttttaattttgtacttcattttcttaataaatcattcttttatacggtcctaggagtttctctagagggtaaatggcgaatgttaggtagtttagatatcttctctaaaatcgtttccagatattctagatataatgtagcctttacgatgcttagcacaaaacaaggtggagggcccaaacgaggcactggaaaccgtgaaacataattccacatagctgaaaggaaaattgtgacgtaggggggaacagaaccggagaaattagactttattagtcaacctgtggtcactagttaactagttaccaagttactcttctaccctcccatttattttaccctttgtccccatctccaagatacctgccatggattcatcaatagaatatctcaccgatcttgaaggaacacaggtcacgtttgatgccgttgcagaaccaccgttcgagttccctgcccagacatggatgatacttgagaagcttgaggaagagtcgaatcgcctgacaatcgaggacattgtcgcggagctcggaccctcagacaccgcggggaagttcctatgccgacctgccggtgaggaagacgataacaggcgcgcatttttgcgcatttatcaacagattcctattgctggaactgaaacgaagaaggccgccatacggggtcgccaggccgtcgatacccctcccgaccactcagaactgattgctttccagacattcacagagctaggttgtgacgttgttccccgactgctaggctatcaacagcgccagcaagaccacgacgagggtgttcctgggggatacatcacgtatattctatgggaaaaagtgcccggcgagtctcttaacttgaccggattctggaggctatcctttgccgatcgccaagccatccgcgataaatttcgtcaagtctatgagtatgattgattatctagtgaccactgcgaaatattgggctaacagagagcagaaggtttttgccgtgcgggtacatgccatgtatggctggtccgtcgaaaatcatttatgacaagtccagtggtcaaatgtatgtctatgcaagattatctatggactatgatctaactatctctaggcacatctgcgggtttaaatccgcatctccatttgacgaacctcaacagtgggatgatgttaactacttccaatacggattaatccaaccctccgatagcccgttctactgggaaggaacaccacccggaacggcggattggatcaaagatgccaacggctggacgtggtgaatatgaaagaaaaaaacacagcgggatacagtatgaagtattatctggcttagtagaaaaacgcaaagggattgttgttggtgtaatgaaggctgtgtttgctatacacaagtatgggcagtatactatgatcaacgtcatatggtatttaatgcgaggattggaaatcggcccctgggtttcagcaatggtagcaagatacgactaatgatagtctcatttattttcatgtgtggtccgaaggccataagtatacaaaaagcccatgcaaacacatgtgccaaatccagtaaaaatataaagaacgagcttacatcttctgaaagtattcatcgaaatcatccgcagcgactttagcgcagtcaaagccgtagatctcacgctgcacatcggcatcagcccacttatcaggcacaggacccttgccagcgcagagggcagcaaactgcttgtcacgctcctccttggcagcaccttcacccaagtgcagggcacgaccagaagcggtagccatgtcaaccaaagcctcagcacggctcttgcggactctctcgtaaacacggagagccttgttgatagactggggagtggtatcagggagtttggaaagaaccacaccgagaacagctccgtcttcaatcgcctgggcagcaccctgagccaagtgcggtagggtagggtggcaagcatcaccaaccaaggcgacagagtcgagaacccaagtcgggagcgggtcgtggacgcgcagcttccactcgcagacctcgccctcgggaacgtaatctagcaggcgctggaccatggggcagaagtcagagaagacgtccatcatggcaggcttggagcccttggtggtataggtagcgtttgtcgcagatgcgaagtggctgtcgggctgggtggtggagaggttgtagatggtattgttagagacggggtaggcgataatatgacgtttttcgccaatccagcgggtcacacggttgctgtttatgagggctaaaagctcggggtcgtctttgatttgctccttgtggatcatgattcgatacgcggcttggtgggtgtccttgacgccaacgtcggcacccacccgcttcatcctccccccccgnnnnnnnnnnnnnnnnnnnnnnnnnnnnnnnnnnnnnnnnnnnnnnnnnnnnnnnnnnnnnnnnnnnnnnnnnnnnnnnnnnnnnnnnnnnnnnnnnnnnnnnnnnnnnnnnnnnnnnnnnnnnnnnnnnnnnnnnnnnnnnnnnnnnnnnnnnnnntgctcgggccggccgggccggcccccccccgcttcatcatctccacgcgggtggcactcttaataccgtctgcggcgagaagcacatcgcactcgaccttgaacggagcagctccctcggcgcggggggtagctgtgaatgatggccgaggaccgaaagagtccacgtcatctgcgctgactccgaagtggaacttgatttcgggatgttgcttgcagccattgtatagtccattggatagtgatgcacgatggccaaccatgtgcttatatccatatgtcttttcaatgtaccgcagatccacatatgcgtgttgagtgtccgttgcgccgtctgcagacatagattagatcgcattacattgtttggttgggaaatcgcaacataccacgaactgatgtgtcctcaatattcacagcctcggcctcaatgcccttccagacaccgagtctatccaaaatgcgggccatgttcggtgctaattgaataccagcgccaacaaagccgaggtcagttgcgctttcataaacatcaatgttcttaaatccctgctgtgccagagccaaagcggaagtcaaaccgcccattccggcgcccagaatggcgatttgtaaatcttgaggtgctgttgtcattttatcggtggtgtgcgaagaagatatatagtaatgggtgttaacacgacaaggaactaaaatataccaaaggaagaatagcaggaaaagcagcgaagaatggcacaaagagtccctttaaagataaaatatccaacggtgcaatgcccgggtgatgctgccgaccatgtcttgcattttgcttcatggccacggcggagtaagtctttcccgcctctcccacattctccccacaagcccgttttgaaggcgctcacacggcttggggatttcatcattccctgcttggactttatccgctttaaaatttgatggcaatgttgtaagcgggaggctatcccgatgtcaacgtcaagtgcagctcatcgtcgtactgcagtcagccttattctcatggccaaatcagcaggggttttagacccacagctttgctttgttcctgcttttccttatacgattaacccaccctgaacaaccttgatatgtgtggaatcggtgtcgatgttcacctcctattctcagctccaattctccatgataacgaacatccttccccacagtttttaactccggacttaccccgggccgctcatcttgcggagaaagtctggttgctgaggctacaaactgccgataacttcttgttggacactgaggtaagaataaacatctgacaatcgaatcattctctgatatgagttaacgggaatggccattgcatgaaccgcctaagattaactacaacaagaatactcggccgtgtttgcggcttctgtcattcaaaacgacgtgatccagttagtcttctcagatctctgtcttctcacggtcgttaatttttataggcaaacggccgaaaaagagaaaattaatttgcgaaacgacttttctgtatgacctttgacttcagtcatggcttatttgtcaccaaacatgtggtctggaaacgtcgctagtaatggcgacacaatgacgtgcggtctcctaaccgtcggtagaagacgtgatagatcaatgatacagggagagagaggtaaatgaatatctatcaacatccatggatggtaaagatcgcatggcgaaggctcacgtatacagagaatcaaggaaaggactagaccccactcacagtagtgcgccatgttgggactagcgcatatcgaagtatgagtgtatgtcgtcgtgtatatagggaatagtgatcaatgagagagttatgttcccatggcacacttgtagagaggacctgcttatatagctggccgctccgtaactggcaaacaacatcacgatgacccgtacagtcatggatcgtatgagaggactggcggacttttgtttcgcgagtctcctcaaccttcacatattcttttgctgtattaatccgttattttgaaaaaaatatgggactttccgggggcatattttcattactcgtcaccccctaccaggttaagaaacgattttggcgagctcaagtagcgccttgctatcgagttatttattgccgagcacgctctgcgtgaacagacgcagcgcgaggaaacgctaaaccatagagctatagctttacaaaaggccatagctatcgatcccgatcccgaccccgatagaactcaacttgaaattagagaagcagatgaacagctcgaaaaggtaaaaagacaacgtccaaaaaaagagcaaggcctttaccgagcggtgtccatgcttagaccgacttggagagccgtttatgatagcataaaggatgatgatgatggtatatggtttatgtgtgaagaaatggttcaggattgctcggatcgaggcggatgttgtagccgggggtgtggatgctgtgcacggaggaggcatctctctaaaggggagaaaggcaagggccactgtacttcggagtgctggtgctgtatcagctgccgaggcttcgaccttcccgaggaagaaaaggaagagatcgcaagctatatgaagcgctggcttgaggaattttcctcgccttatcttcttaatatggcaaatgcttttttctgtccattaaagccgaaggtaaaatcaaagccgaaggcagaatcacagtccacgttacggagactatttgaaagagggtgaaactgacgttttaagtctcatgaaaaacatactttacttcagagatatttgctcgctatatctccccttagcaatttctcggttacttcggcacgacccaattggattatgtggttgtctagcattcaaataccgtttttatcattgaattatctctaatattggtggtactcgaattaatatggatagcttcatggtgccatatcatggtatggtcgtaagtcttgtgtttggttgacaagaccaacatgatgaagtggacgtggccctatatgcgaattcttgacgccggtcagaaacttgatcctatcgtatataatatcccgttactctatatgcactccttagaaatttctagatatacgagatcttcacctgattggcaagagctattaatatctccattgaaatgtgattgagctgcccttactgcttctatcttttttccaccatattttggaccgcgctgtttccggacgtattcgtgtctgcaggcaaacctggtccgctggcagaagccgcaaggtaaaagtccgttgcagcgtatgagtggcacggtacttttttgaacaacatcgtggtttcgtcttcatatacagacactagtaagagatccaaaaaggcggcaagatggagaatttgatctcaattctttcaaataatagaaacttcccatgaaacggactaatatacaaaccaacgtaacaaaatacaaccccccaaaaacaaaatcaaaaccaaaaccaaacaaaaatccgggtgccgaccctaatgtataaaagagaaaaggcagggaggatgggaataagcggatccactattcatgtgggtgtatgatagaaagtagcggcaaatacttctaatacctatagaataccttagtaacctgattttttttttatagtagagagcaaaattagactagtatagaaggaaaaaaatccggtgaggaccagtattatttttcttagtataatatataatgaagagggaaatgcacgatgggcagcctggccatgcaggcaagacgagaatgacacaacaataccaaccatccaggacggtcagctagtaagcatagggatcacatagaccacacatagtatacaatcgcctaatgcacaaacatatcgccacttgcttctcatttctggagtggtgatctgattaggttcctctctctccaaaactgtacttgacaaccgggcactcgcttttctctacctgaaggataaggtaaggccactaaacgagggattccgattttccccactgcaataactagtacataattagatagaggggtaatatctgtctataaatagtagctagataatctaatggttagatcttagaaaatacaatcgtcgcggattcgaatccaggtccgattaaatataatataattaaaaaagtagtagtatagtaaaatataggtaaatcaaagcacctaagtacctttagtagtaaacttagatataaaaggtaccttgaaataataagatatagataatacgagaaaagaaaaacccaatgtttttatatctactccgtataataccctcctaatacgtattggtagccaatacgctttgtctagaacagtaggacatgcagaattttgggaataccttttgggccgcaatactgtgttatgaccgtcatactacagggattctgatcaagagacccctccttccaaggaggggcatattaccaatcccctctcccaaataggtatcgaaactatactactatcatggaagttcatgtagcatatggattgtcaccgctagaaattctgaagtcattttccgccttgagcagcggataatttgcgtacttctgcactgccagatccaccttctcatattcttttgtatcccacccaacttgccatacatttcttcatctcaagcaaacttgctgctatccataactaacctatcacttattgttttcacccataccgtgcacatatttggcatccgaacgtgttctaacacgccatggacctcgatcatgctctgtctaccttcatcttccatcacatattcttccccatcagactcccacaggaagctgaacatgacctagttcagctggagagccgcctgatcgtggctgtgagagatgtgctgcaagatttcattcagaatgtcagccccgagtcccagcagcgatgggacctagctttgagtatgttgtttacctggatgaagttgcataccgagcagggaattttgcagagtggcttagaagaagctctttcgaaccttaaatttaccagtaagtgggttgtgttctcgttagatctttctcccctagcacattccagacggccccggtcgagaaaacgctgacctaactaggggctattgcatgtcacatcagagcccagaactgcggatgggtcgccttttacgatgcagaaaaagacagggttctcgtcgacgcatttgaggtgtcatcggaggatggatcaatactgtcctcctctggtgggctcatacgtcgattccccggagttggtgtagctatctcggcagacaagctgtctgatccgacattctgctcctatttggccaccgaaatatctcaattagcatccgaggaagtgcctgagatgctgccgaaaagcaaaaaagcgggaattgaagtggacgaaatccggaacacaacccatcctggcctggtgacagaaggcttgatgacacaacttctggcacttggtacacaccatgaagaaaaaagggttttaaaatgtgtgcgagacgaggtaaactggaagtctgctttattaccatggaggcggtctccagcttggctcgtcatccgagtcgctctgcagttggttcttcggcgatgcttcaatgaaacggaagggcgccttcattacaaaaacttcattctgtacttcatggcaacactggcggcaagacaaaatccgtccgtagcctcccatgaacttgtggattgctatgaaatcatgcgtgctcggattggccggcggatctgcaagctggaggataaagatgaagtcttttcatttgttgccaaccgtgcacactccgcaagcaaggatctgcttgacagattgatgtctattaaaaagcagatcaaaataaccaaccgcgtgaggattccgctgattccatcatcatcatcttcgcaagatgatgttcaccaatcactgcttcattgcaaggaatatcttcaagcggcgatgcgttcgtcgcctaatcaagtaaagcccacaaagttctgtcgaactcacacatccaacttgaaatggagcaatgacttgcccattccgaagatcgggtcgatcatggctctcagtgaatttgagcaatgggttgatgggcacctacagtcctggttcatcaatcaacctgcttcgaaacatgaagcagcgtgtcgtgaacttgaaaataccattgcgcagtacttttccctcgcaaagccgacgtacatctccaacccacaagccacgtcagtgatgattcttgtaatgttggaactgtgggtagtgctagacaaaatggctctacgactctgtcccctgatgaagaggttctctcctggaatccccgataacttcctcgaacctctactacttcccaagatcggtcaaatgaaacgggcgagggaggtcgagcagtacataaatgtgcggcataaggaatcggacaaaaccaaccctagcatcttctgtgacccagcaccaaattgctttggtgttcaatttttcaacagctccgaggaacaccaaatgctcgaatgcagaattgagcagtctgccaatgcaattagagcagcaaagcaagcggaatgggagagattaagtgctcaatacgaacgcctacacgaacaagagcaacaaatgtcgcattattatgattacaatggcgatgatgaatacgttcaccttccgcgggattgcccaaggtgttcactgaacaaacaaatcgaatctatctccattcgggttcatgaatggccacttccaacagaagatattgcacgaaaaaccgctgtattcgagctcagtattcccatttggtttgcatcatggcgcaacagtacctggagagttctccacgagcttggacgaacacttacagtgactactaccgatatggaagtcagatggcttgaatatacagagatccaaacattcgtcacgagacgcgagtcgaacattgttctggcctcatatacaaaatcatggcggaagtctcactacagatcgcacagattccctgtttccttcgattctgtttgcatcccaaatgcgcttcgcctgcgacttttcgacaacacaagaattgcctgggtgacaattcagaccaataaaccgagcgtcaagagcatgtgcaccatacaactcccactcggagtgtactcaaatctgcaatacaccctcaattccacttcacactcccagaaccaggtcatagcgacccagaaagactgcgataaaaagctcagcttgctagaatttgaggcttacggatgtcttcgctctggggaaaatcttcaatggggcaatattttgaggaatctggcatcatcggcattatcactgaatgaggaggctgttgtctcccttttcaaacaagccgcttgggaactggggccactatccggaagattaggctcaatcagaagagctgcacatgaagcctttgaggatataggctttggtgactgtctgctgcacctgttgcgagagagattggtgacgattgaaaataactggaacgaatattgcaccttcgatcttattgtcacacttggtgttcgtattcttgctttaaaaagtggatcaccgtcggttgagaaggtcgttgaattcctacgacaatgtcgggaggtggcgatggattggtgcgatcagttgaatcaaagtcttctgaataaagaagagaacgacgatcaaagacaacaacagctgctacttctgattgcatctacttgccaagccacgtatgatgttgatcctatgtttttggacatggttatcgaaacgccccgagacctcttttgtttcgtccgatgctccattttactgttcgagaactcacctccagaaacagacggtctgtcgcccaagataaagcttagcgtggagaattcagaaaggatccggtcactatcaagatcacggataatatggatgattatgaactgcgcgtctggattgaatgaagcaattcaaagtggcatgaactgtcttgaagtttccgggctttggaaaacttgctcggatacctgggtaactacggaaacaagcaacagtgcgcaaggctttgggcagcgactccacttcaattatctcacaggtgaacttcttgtggatggaaatcctccagggaggttgccagctcgctttgcgaataatactctctaccaacgcctcttcggaacggtaattctacctaaaaccttcatcatatctagaagatgtattgacttttctatagagagttatcccggtgatgccatcgagtttgcccggagcatcgtttgtcttgtcacacaccgttgagaattttgaagtaagacttatacaacccaaaaagccgagctacgatacacaatctgacaattgataggttcacttcgggatgcagagtgggaagcttttgatcaaaacccgcaaggggtctcaggtcttgcagcttataccacacgaggtcctcgagaaggacttccctagagtattaatctccgagaactttcattggctggatttggagactggggctgttgaattccgtccactgaaccagccatggaaaccttctgaccgcaattggcatttgttctttgattctaattcgccgggcaacatgctcatgcaacaagattccaagaccctagtcgatgtgcagagcccgcctttccaaaaaattaatcacatattgaaagtccttgatgcaagtgatgagattgtcgtcattcggacggctgttggaacactggaggcagaactaagccgtttacggttgaaattcttcgtcaatgataatggacgtgtaacgtcaaaggagttcggcgccctgattgatgtggaccaagacatcggctgtttctatggactgaagaacaaactggtcctcgttgattcctccaataatcgatcggtcattattccttacggaaacccgatgattagtagagaagatcatcatgttgcagtcacaatcgatctaccaaccggaaatcgcgcgaagtacatgcattatttcttggacagtcatctacaagttctgcgaggatttcaccctctggctatcttgtaccaggcgtacttgcacgcaatcacgtctttccctgtccctgataacttgactcatcgctcaggtaccgaagaggctatccgtattctacgtcaggagtgtttaaaatcagcattccctcttcaaaatgatgctaccgagaccctggaaaggattgcagcacttacgccgtgccgcagattttatcctcagcaccttcgtgtcatgcaaactatcgtatggtctagtaacttaggtcaacttgcccaacacgatgacttccagtccttgtcgcaagagattcttcagttctctgagcagttttcacatttccatggtgccaaaaagaaggaaaactgcctcttatacccggggagtattgatttgttaaagcgtaaccgttgccgcgccgagcagatcatgaggtcgcaattcagcgaatcccccactccatcaaggaagataaattacaactcccgcgattgtaacatcacaagtgctcgcagtcagaatgtgtatagaatcgcagctctgattcgagattggcctacgacagttggtcattcatcacatctactggcaaccatgaggcaattcaaaaacctagcaacgctctcagctgattttacccgttactcttgctctcaaatgctaaatcagtcgatggagagtgcctgggtgggtttataccacgcctgccagacaagttctagggctacgcacacctacttcttgatttccttgttttctatccttgcgtttggtgggaagattgaccagtcggtcctccgtcaattacttcaggttgctttctcggagaaatgcaaatatattccagtgccactcaactcgacgacggtactgaatctcagccttgggggggactttgttctttctcaaattcaatacgcaatcaatacttcctacacaaccttcactaaggtatacaattcacacctctcacgtgcagaacaagccaaaatcaaccaagaagccaaagccaactggtgcaaacaaagggccgaggatgtacggttgtgtggggactatatacgagctcagtggccgtccaaaactcctgtacttccatctcatgctctggttccactggttcgtagaaagccggcacatgaaatgatacacatgctttgtcgcgattgggtccaaaaccggaatttccttgacttcctgcgccgggtacagaaggaagtgccgccctccgacccttggtatcacgatatggatcctgttcccacctcccctgtccactttcaggagattgaatacagttcatttcagccaccctgtggctttgatctaatgcataggtctcatccagacccccctcagactccgtttgctccgatgacctatcgcggggtttcttcgatcctgcaatcaacacctgagctctggtccctagcaaagcatttccaagcgagctctaaccaatgtcaacaagagtatggaaacgggctaagtcaaagtgtccaagcgttagaggacttctcaacttcagaatctacgcctggtgaatctgaccttgctgcctcttttgactgggtgacaaacggagatgcggtacttcgacatcaagaagagcttgaaagacagagagatacattgtgggatgaaattgtcgcgaatttaaggacgagtgcaaatacaatttggccagatactgacaccgtcagcccttctgtcaccgtgtggtcagttctgtctattctggcctctgataagtggaccagcattcccatccagtggaaggtgttacttgtggcatttggaaagtccatctctgccctgcgtcgttgcgagagactgattgcctgtaccgaaaatcgggatatcgatggatttctcaaagaggcagaaaacccgggctatgaggggtgggaccctttgaactacccgacttggctgctgttggaaattgaaaataacattactatccggaagcgccaagttgaagttgcagctcggatgattaaaccggactgtggtgaaaacgcagtgcttcagcttaacatgggcgaaggcaagacttccgtcattacacccatggcggctgcagtgttggccaacggccatgatcttctcagaataattgtcttgaaacctctcttaaggcagagtgacgcgctcctttctcagcggctcgggggtctgatcaatcgacgcatctaccacattccattttcgcgacaaacggaactttcttctcccattgttagccagctccagtccttatatgagcagtgttgccgccagaggggtattctgattgccctccccgagcagatgctctcattcagactcataggattagatgctgtggagagaaaccccaatatcttctcgccactgatacgtcttgagaattggctgcaaagcaagtgccgggatgtcattgacgaaagtgacgaagtcctggatgtcaagttccaattggtttatactatgggaacgcagcaatctctcgatgggctcagttgtcgctgggagacgactcagaatttgcttcgcctggtctccatacaggcaaagcgtctttgtcaggatgatccaacatgcatcgaggttgatcagctaggttaccggtttcctattttgcgatttctgaaagtcgatgcgatcgaacgactgatcggttacacactcaagtcgatctccgaaaatggaatccccgggttaccatttacccaatggaattcacgggtcaagagcagcgtgatgcgattcattgaacattctgaacttgccaaggacgacgaatctttcatccgggaagaatttgacgggagtgtctttatgaccaatcttctcgttttacgcggactctttgcttatcgcatcctgcggttctcgcttgctgataaacgttggctagtggaatatggcctccacccttcccggtgtttaatggcggtgccataccgtgcgaagggtatcccatccgagaattcagaatttggacaccctgatgtggcagtgactctcacctgtctgagttactactacgatggactgaggaaagagcaactgagggactgcttcgtgctcttggccaaagaaaatgacccttcaactgagttccataactgggtcacgcagtgtgtggatgatttaccagccggtttacggacatactcaggcgtgaacctcgaggacgataagaccttcacccagactctgttccccattctccgctatcagaaagagatagttgacttctacctatctcggttcgttttctctagagaagcaaaggaattccctcggaagctctcgtcatccgcgtgggatattcctgcacggcgtggccttcaactgacgacaggcttcagcggtacgaacgataaccggtttctgctacctttgtcaatccgtcaaagggatcttggagaacttcttcacaccaatgcaatggtactaggcttattgctgcgagaggacaacaggcaatgtatcctggcgcaggatgaggagggccgccagctagatgttgatcggctcctgaggcttgtagtcagcaccggtgaaggctcacccacggccaagcctgtacgagttttgattgatgttggtgcccaaattttggaggccgggaatcagtcagtcgcccaaaaatggcttgccatgaccccggagggagatgttgaggcggcaatattcttcgaccaaagtgatgagactatggtgattgaccgggaggggcatgttgagactctcttctcgtcttcgttccgacaacgaatgggggcttgcttggtattccttgatcaacaccactcgcgcggtgtcgatttgaagttaccacttgcgacgcgtgccgcagtcactctagggccgagactaacgaaagataggcttgttcagggtaagctgtgaagtccagatatctttcaaagccagtactaacttcctctcagcctgcaaccgacttcgtggccttgaaaaatgccaatcccttctatttctggttcctccagaggtcagccacaatatgaggtctatattggggatatcatccgatagagttttcacttcagcagacgtactaaagtggtctatggctcagacatgccaggccctggacaatgtacgcccgctttgggcaaaccagggacttcagtaccacaagaagatcattctttgggatttaatagtgggacaaagtgacccctccacgaagtctaaaaccgctagttctatacaggagcctgaagcccggacactctcccagctctacgcaccttgggacgaggataggcggggtaggaacggccacaagatgcctgaatggaatgtcaacaatgagcaagttcaggagttgttgaaaactttgcagtcaacttcaggtcatatcgcgacttctgcttaccttcatgaggaacaagagagagaaattgcatgcgaggtggagcgagaagaacagatttcacggcccccatcatacgagcctgaagaccacaacctccacgacgatatccggtatttcgctaatttcggcaagttccgtgataagaaaccatccaaggctgttacattggctttccaaggtctggaaaatacatctgctgggaaggagaaccatccacatctgcttgggcctagattgtattccactgtggacttcaaccaaaccgtgaaaatttccaagaataatgtcatggatgatttcagcaagcaggtgaattggattttatccagtgtccacagcgatgttctgattatcgtgagtcagtacgaagctaatgagctcatcaatatcgttcgcaaatcagagaatgtcagacttaacatctacaccccgcggctaacgaagcccatgcggtcgttccgccaccttgacttctttggcgttggcgcaaacattccaatgcagcctgacgacgcaatgacacggtgtctggagatgttctctgggagcctttacttcggctcattcgaagattacaacaatttccgttccttcttggggcttcttacggataaccttggtggaattccagacgatgccatgaccaatgagggattcgtcaaatacatttcccgcaggcaacttcaatggcctatcgactcaccctttgttgaaaatccgcttccgttcctcggtgccctgattcatattcgaaccaaaggaatgggataccaacaatctcatgtcggcacactcgtcaaagccatgccattgagtgctgaacgattttgattccaagcggaatgttcacttttcttggcgtccaatgtttggaaaagtttctcagtttgaaccaatttgtttttttttttttttttttggcaattcttttgatgtttatatgttgttttgtggtgctggtgactttcaggccttctagtttcgagcttgctgcaacggtcctgccttaggtagatttgaatgttattttatctccttctacttcactctcttatgaatcttccctagcgggagactcggacgttaaatgcatattgtaatgggggattccagtgcaggttgactgcaaaggggcagagcggccaaaggtcaaagtcaaatgcctgaatgtgcctagattctgcctaatttcagactggcagaaatgaaatacgtgaattaccatgacagagggcttgatcataaagagaagggattgctaatttgacacccccccccaaaaacctattctgccctgcaacttcctaatcgggtaccgcttttccctcgacgcttactttcatctccgcgttcgatagttgccgccttctgattttatataccgctttcgtgacaatagtagtaagacagcagatacctaaaatttgtatggaagtctaacaaaatcaagttatatttgtcatagtaactgcttcatcaactactcccatctaccaaggagttgattcctatagaaactaggtagaaagaatatacgattttttccgatgaaactgcatgtttctttactttaccgagtaagccagaagctggcagaatatatagtcgtaccgaatatggaagtcggtactgaaaattcaggtagagtagaataggttgagagggtcaaattagcagtcccctaaagagaaggaaaaaagaaaagaattagaaaaaaaacttcgataaggaaaatcaaaccccgatatttgttattcgaaagtgagaatatggtctcataggctaaaagagatatatgatggaaaccgtacagcgcattttaccactctttacaactagaccataagtaccaaggttcctgtttaaggccctatccaatatcaatgatgcaattattatcgacacatttataatagtatctcactcgcaaaagttttgcacattcctacacattacatccttttacatgctgtatcggccctagcaagttgaagcgaggaaaaccacttcctcttaatcatgaggaaagaacgtttgtattcttattgggaccgtgagcctccatgtgcgtcttgtggcactggctctgatgaggtacaagacggtaagctctacccagttgcaacttgacaattatatcgcaatagatcactgaagatcagctcaatgccagttcgagaatgtatcgaagaatgttatggtgataaagaaatacctgaatggttcaaggattggaaggatgacctttccaaatcatgcgtgttccatataggctgctggagattgttgatacaacatttcaacaacggggttgttcctctcgataaattggctaaagtagtcaaagaagcaccttggccacagtatcgagcctgtaagtcattgtttacttttcttataggtttttgcatccacgagcaatttcaaataatcaatgagaacttttagatcatgtaatcccagacaccgggacgcctagctcgagatgctttcgatatatcgggttccgggccgaatcaaagacctttccaaaggcagaaaacatggaatgtgaacatcctctgaaggatgagtcccaagtgaatgactgctttcgtctccttccactcgaaatccgcttcgaaatcgcctatcttcttccaacgcccgaatacctcagcttaagacttgcgtcgaaagctatggttcacatatttgaaaaccaggaattctggaaaacacgcttcttcattcatcgggaacgaggatatctcaactatctcttggaagaaggttgtggagactggagattaatgtaccgctgcactagcagactcaagcgtctagcccggacactacggtttcgaaggctacagtggcttcataacgagtggatcaaagataggtgtatgatgattggagctccaatatctacgtcgcctgagaatacagctcaatttgatggcctagtgtgggaaagagccgcaggaaaagtccaatgcgataggccttacaaatccgaaatcactcctccatcttcactcggcaatgacatctgccagcgatgtcgtggggtgcataacctattaccacctcagatggtcaccatctctagtgagctcgtggaaatcgctgtctccgtacttgctgaagatgaacattcatttattaccgggctaaaccttgtctacggcgaaagttcaccaagcattagccttggctatcaaatccctcaaaagcagatcaagattgatctccgtggtcagccgttgaaaggcttcgaagtcctcgctggcgaagggggcatccaggccatacgtccaatatttgaccaaaaacatggaataagccgtagcatgattggaaagccgaatgcaacttgcaaatcagtactacttaacccagatggagagataaaagcctttgcggggtatttcgatgtaagtcaaatatgtgctgttccaattcacatgcgcagcttactgactcaattgtagcactgtaggatggtacaattttcaataggttcattgcgtccagaatcattttgctgagcagagagacgcaaactaagatgtctagttagttaactaacttgctgagatttacgaaatctcagattctcggatctggcttctgattggtcgagaattttgtatcgacgtgactagggctagtcacgttactaccggccctctataatatctattcatgacttgctagtacctaggtagggtcctattaaatgtcatggccttctgccaattgctaccaatacgaagcgtctatttgagcctatcattcgatcgacctttctctagaggcctatggtatcgagaggaaggctttagagagcttccgggctcgttgcctcttagtaacttagatgtcatgatctaccatagatcgctatcatatgttttatttttgcttgctcgcttattatttgcattgtttatcagtttgcattagatggattgtttgctagacggctaagcgagatgtttgaggtttgcgacgtttgcaaagggacagctatatcaactggctgcctcccactccacatggcaacttgcctcttctttctctccaccctagttattttgaattaaaagcactcttcctctctgagacctggcacattacattataactaagatccccagctacgcggtcctatagtttgattattagcatttccgctttcgtacactgcatagaggtctcatattgcgagtatatactcggcaaaagcgtcttttctcttttaggtagtccggtgacgcgacagacttcaggttgcgagctagagactagactgccccgggacgttcagtagccgtgcgcaagagactgttcggaccctcgatacagaacccggattttttcttttccttttcgaaacccgaatccacctttttttcttcttttcaaaacttccaggtaatggtttcatggaatcatcgtgcgacaaatcatgctggcaagactgagaagttgacgttgaatctcggaaggtggtcttgcacgaatagcggcatccaagtgtcgtaattagttgaccggtaaactgactctagatctgggagaggatcttaatgttttggcggtatgtaaacgaagagataagttggtgttgagcctggacctgttgaatgttgaaagtttgaatttcgactagagctgctgaatctcgctataaaggttgacaaaagttatagtgcattcagcgcgaagctctggacgatattggtgatccattttgacgaagatccagaagaggtaggctattttttcaacatagatattaaagaggggaccctgtgacggggtcaccagggataccgacagccctgcctgtgaaacaggtgtaagagcaaattcaccactgggagtggtagggtgcttgagaggacaacaccatggggtgactactcagaagagaaggtggagggtgtttgcgttcacttctcagtctcgctagcatgatctgtcgcacaattatcccaacttacacataacacaacaatacaatttttgatcaacttggcgtgtgcacgacaactacaacaagattcagggagaccgtctccctttccaattcgcaggacacattccaattgttcattagcttacaaccatatctctatctctcgttctatatcattccccttcaccgaacacatgcatttttttcttgtcctgcttccacgtatctccatatactaaccccgagatctataacgcttgatcaagccaatgaacgccaaaaaaaacccggtatcaattcctctacatcctcctactccttcaaccctactcacgaataatatttgcatcgcctcttggccttctttcttttgagcttctcaacccgcctcgcataggcacggctttcacggttggaaagaaattcatatctttcctacaaccgaacgaagccgtctactttactcctagtttagccccgaaccattacggtgtttttctgctattagccttacgccagtttctccctatcaacataatatattgaaacccttcaatgtgccagtctggagcttgaaagttgcctgctactacacatttatcacatgcgacactgcccccagtgtttggcttgagaataccccgactgccattgccaatcatcctccggtttcgactcattctagtactcctagcagtactgctaaagtgagctccactgtagtcgctactcctacactctcgttcacttactgtctctgtccctgcagctctgtcctctatcgttactggcaatttgcccacagttgcaccgaccagtcgattgtcctccgttatacctgtggattcctcaccacctgttgtcgcaaacgcgcgtgcattctttatcattctgcatcagcgtaactccattcaaccgcgagatctgcagcgctttatcaagccaatgaccaccaaacaacaacttgatagacattactctattctctcaatatctcaactctacaacagctctcagcgagatggctgtaagtccatgagtgcttcaatgtatcagttcatgaccctaatatataagtacagtaccagacacagccaataatagcttcctacatagcgaagattttacctgggacccgagaggttgaagttgaccacctctggacaaacctcctcgcatattatttcccaaccacgcaaacctacggcgttgaacgggaagcctatatccgatctaggtcgcagaccagggcgaacgtttgcgtgagcacgctaagtgatggtaaaatgttcaatgtgattatagtggagaagaaaaaagcctcgacgtcacgaagtgctcatccaacgcccggttcttggactcatgcagagggacaactactaggctacatgctatcccgccgtgacaatcaagagaaagatcttcggcgtctatttggaatagtaggcattggaaggtacgttaggttctatcaactcatacgaggaaagaccgagctcgaagattataaagatggtgcgacctaccacttggataatgatggcttagcgattgagcgaacgattttagcgataaaaagctacatcgatagatatcgttgatatagttcacggttttgttgattgtttctttcgtgcttttttgtttccattcgtttacttttttaccttttatctgctgtcttcggtctgtttttttttatctttatggagcttattattaccattttgtttcgggtgctctttatagagtatcgtagtatatacccgttgaataacacacacgaattcgactagttcaactactcgattggccacacggcaactataggcagttctgtctgtgggggctataaaaccctatattaagcgctaatcatccggaccttagtagatcctactggaccagcggtactagaaatacatttggcgtttatttactgattataagtagctgtactccgcaaaaggcgcgggcttacaaaggcgcgaaaccttcggtcctgcctttgcaggtcgactaagcggtcacgtgatataaaacacccctgaggcacagatacttttcacttctttattatgagaaagaccttggtcaacttttcatttctgatgtctttgcatatctgtagggagacgtgacctcctggtctgctcccaacaacactttcatcctcatacaaatgaggtttcccagagcactccaatagtcaagtcgtcttctcaagatatatccaacaggttatgacctatgctattgaatcctctacatacttgcaagcttcaaatcctctatttcctccaattggtgccctgcgtcgcatactccacagtggggctctgatcccacaagtcagaatttccacgatctctattggccgaaatcggcacgtggacgtacctctcactttcaattggttaactgttgtctccactggccgttcgttgatttgattcgttggccactctatttttcaacccaaaattgtatgttttgtttgcactgcggtcacgttagctttctcgccctaatgccgattcattgaagcggcatatgaagaaatagaacaacataatatatccacacttacatggttgcgtaatatcgcgtgatgaactactcaactaaagctcttgaggggacactctcagcttaaaatagactataatacaaagtccaatacaacatcaaccgatttctcgcacgcagcatataggcacgagaagctgggcgaaacagatggctggattacttatgtagtatcgaaaatatctgagcttagtgagaatctttcctttgtctatttgactgtctagatttaccaacttgattcaggtaactgttgtttttggtgtcaaaatctttgttctttgtttaaagctcgcctatataaaagacgttttccacaagcaggagaatctgacttacattaccgtcagttaccgctcactccattactaaacaaagtcctagtgtcgttgtgctatataatatatgatcattcgtgtcgttggattggatatctcaaatatgatattaaaggtgcatcagttcccttaggccctagtgtgagcttttgccagctctcgacatgctttgcttgccattttttcccttcttcctttcaatttccatctacattagccaataaccgcacttccccttcttccttcacaactgccctcgccttatatatgatactagtgtatatgccttgatcatgtgagtctacaggcccctcacttactgacaacgtcaactcgctaactcactaagctagcctagcttacggcctcgctcccacaatgacgtctcgcttcagtcaatctccccagtgtttcgaagaagccaacccccacgtcgcgtgcacaaacaataatcgagaccatatactgctagcactcctccaacgagaacttgatccgtaagcttctgtgccattctcgggtcaactgcaatccggtgtgataataactgattgtcagttgatttttcccagtagtgtgctaacaagatatagaaatgcccgaattcccacttcggtcgttcggtgattccgagctagacatcctcatgaatctccgttatcgaaaagcgcgatctatctaaatgatatttcgagtgttcggagatctaccaccatgggaacttgacttttcacatttttccttttctgcaaacagtctgcgcaagtcaccgtcatgtggatagtaactggaatccgactcaagcgaagttgacattcgatgtcaagattgttagcagggacaagaaaatcggagagcttggatcgggcgtcttcagcttgtcatgccaggtagacggcttcctagagtcgaaatcaacctttcgagcacaatcaatcctcgaagcaaaagctctaaggcaattaatccatgaaccgaatgtctattggcaggagaccaaatggttagccctgttaaatgcgcatcctgagaagagccttccgaaggataggtaagcatacagactgatatcgctatatttgagtttctatactgatatgactattagtacgccgataacggtattcatctcacaccgttgccgaatgtttctggcctttacctcttataaggacgggtatagacaatataatagggtgattcgggaaagcgcttcgtgaagcaagacgaatttatcgaaattcaccgatataatccatattgtgacgatccgaagatctaagaacatgggtgtcgggaacagaaggtactcgtcaaccgcacttgcctggtctgcgttgcaccttcctcaaacgtaagtgaggaacaccctttgcatagcttgcagagaaggacacgcacaaaacccaaaggaagagcacgtagatagttttccttctcttttctctttccgtacttagtatttggacagaaatgcactcttttcctctgaactgatctggcaggtaacacgtatctcatcattaagaaggaagacgcaccgtactttgccaagctagccctagccgtcgctctccgtacgagtaaagaaggggacgaaagaatctaaggctcaaagggcatcaattgtgatacattcagttctcggctataccgaagcgcccctctttcgtaaaaattgcccttaactcggtgctataggtctacctgaggtctacagaacggcttcatgatttcgacgctcgccgaagagatgaacgtctatatacggattgagtcaagtcgatacccccgagcgataccccgaccgaagcaaacaggcagacatgtcgtggggccagtccgtgtgttgagggattttccaacggtctgaaagcagcatgggtcagcgaacgcaccctgtcggcctacttccagatgaagtcaaaatcccctagtaagatcccagacacagatcgggactttttttgacatatgagtaaagcgaatgagacttgagcaatcggtgcgatgggtggaatcacagtgggaataatggaaattaaacttcagtcagttagtcgatcaagacaattaaagtagtaacattgttatccaacaatgaattgtgcccatcaacctcgggccaatgacccgaatcgccactagccgtagcttatctcctagcgtcgggccgaactaccaaaaagcggatagccaagaatcgaatgacgcgcggctttctcgtatgttataggcctgtcgtatatgaacgttgctttttccgctcatgcagcccgatctgcgatctgataaaagtttccgaaagagtcaatttcttcgcactgctcctaccagagtaggctctcatcaagaatgcgaccacaatcgctcctcccgatactcggggttctagccttatcaaatgccctctcagcagccccaaagaacgtgtcgatcagcaatgagaatcacattttcaacgtcatccaggactcaatgcgtcaatggggatcgtctctgcaccacaatggcgtgtcattcttcctcgcggccgttcccgccggtacgcagttctaccatggaacctccaaggccagtccagtgaatggcaccgagtggttggcgttcgagcccgaacatgccatggtcttcgcccggccccgacgtggccccccgccacacctaccacccagtgatgatgatcccgagccagaggatggcagccatggtgagctgcggaagcgtgaacaccatggcccgccagctggtcgcccgccgaagatattcgatgagaatgagtccgggtatctgcatacgtatgctgcagccaaggatctccgccttctgtatcttgacggtatgtctgccgccaagacatcgaagggcacgctcgattctcaggatacggttctgttcaacagttcgttcgaagaacccccgaggggtggcgggcaagagtacgaacgcgccagactggcctgcgagatggccgagaatgaatgggaaggtcgcattgacggtgtgctgcgcatggaagctggctttgagattatcctctgcaactttgagcgcgatctaactacagtgcgaatcacgcaggtcaaggaagacactgaggaacaccgtggacttaggggtaaccgtgaacacggtgaccgggatggtcctcgcagagagggtgatgacaagcaccacgacggtcatggcggaaggaaggacgatgatggaaggcgacacggccccggtggccccggcggtccgaggggtcctggtggtcctggtggtcctggaggtcctggaggtcctccccacggcggacctggaaacgggcccgactcgtcgcgctggatgcgcgcaatcaccgcacgctacaacggaatcggtgggaatcgagtgtcgctgaacttcaaccacttcgtgacagccttctcctacgacgtagaactcttccaagacaattcaaccctgccccgacttgcctacctctctcccgaggagcgcgctgctatccgtgccgaagtcacaaatctggtcttgacgcatcgtcctgccgatgtctccgaagattggcaggcgattacggatatgatcgtgactcggtacggcgatgagctgtcttactttgcttccggctggattcactcaattgagcgcctgcagtccgagattgagcgtcttctgtcgccgttcattgactacagtgcgcgggatgatgtcgctgagattgagcgttgtgcaactcagttcttgccgccgttgtctttgaagagtggtagtatcgcggcgcatgctgtccatggtgttgctcaaagaatctgctcgtctctgattgaggctgggaaggagaaggagcttgactctgcggttcaggttcttcgggatctgatcggttatcttgattgggcgacgtggaaggagtgccggggttgtgcggcgaatgagatttgtgtggtgcctatttggcccatgggtacaatcgaggactatgatagtccaaagtgcaaggatgcatcaaatccatacgaccatcgtggagagagctactggggtggaatgcaccactgagtgacttaatgtggatcactagcctttgttttagttcgggttttcgaccctcttccagccagacttgagatttgctgtttggacataattggtttatttcaggcatatataacatttgttgagggtatatacagaatacagaacataataatgctcaagaagtatgtagagtatgtagaagggattgaccattttgttcgtcattgttgtatgtggcagttccaaagcaaatcacggagtgatattccctttacatataagaagtaaaattggcaaatggtagaaaagaaaatcagatcccatcaacgggagaatatttactggacgagaccacccttggcggaggagacgatggagccgacggtagtgccaacgctgccaaggccgagagtggagagaagtccctgaacagcgccgtcaaccttgatcaaaaggacggaaaccttatcctcggcgttgacagcaatgaagttagcaccagggatctcgggaaccttggacttaagctcagagacagagggagctacggcgacgacgttgccgatgggaccctcaatggtggacaagtcaagaccgctgaggagaccgacgacagtaggctcaacctggacaagaaggttcttgccaccagcaaggccgttcacgtcagtgatggagagaacgttttgtagagggtcgtcgcgcttgacgtttccagtgatagactcaaggccgccaacgatggagccgagaaggctgccgaccttgtggaggccgagactggagagcaggtcgacgacttcctgggtcagctcgatgagtgcagcgttgccattgtcgaggagggcggtaatctgggtgaggccggaaccggtgttcgtgtcgagcttgtcgacggactcagccgtttgaatgacctggcccactggcttctcgagagcgctcaagggcagcttgctcatcaagctctcgagctcggactcggccatcatttcgattttcgaggttccagcctggttgaggatggaaagaacctggccagcaccggtgggatcaggcaaggtggagaatgagggagttgcggcgacatcggagccagagggaatcatagatgtcatcggtagaggcatgcccgaagggatgacaccggagggcaggctagagggaactccggagggcaaagagccgatggtacccgaagggatgttggcgggtagggccatagccgcagaggccagaagggcgaaggcgaaagacttcatcttgtcgttcaatgagtggaataagttcaaagacttgtttggtacaaaggaatggacggtgtggaccgagattaaagaatgacttgttggtaaagaatgacaagaagaaagttcttagaattcaaacgtcccgacaagacgacccctgttatatacgatagctgtcagcatgggatcagcgttgatgcgagtccgacccctcgtctgttgacgtccttgagcgttctcctgagctaacaagtcttgaaaggggaccgctcatgtcggaaatgagaccgatgggagaatggagcagtattgttcctgtttcatcggccaagacgaaagtaagcttcacgctgagtggctaataaaggcgctaccacacaagattgggtccgacacatgttgctagctccactataagcttcgtatgaggtccatcctcattagccactttgcagatcgttcactcggtgcaggaacaaagcccgggagggttcccactctggctgtcaggatgaggccaagatattgatggaattttcgtctttatgggccaaatgcagatcatttgtgaatcgggaaaccccttggtcaaggtataaaaggaagcatccgcattctagggtaaatttgccgcatagtgagcttagccttcaaaatactccgcactctgtatcatcacagcaatgaagattccgagcccaaatccaccggcgcttgtgattgatcgagtcttgtgcagcgaaccctgaaaagtcaagccgggatcgacatgactagtacaaccgtgcagatcggaatcaccaatcatttgttggtatcctgcgcagggtaacttgagatcagcactctgtccgccagaaaagattgtaagaagaaggttaaacccaacgtaggcaacactaaggtagattgcaatctcattcctccatagtgggtcgaaatgtcaaatagcgcagtggggccgtgattcccgtcagctgcgttgagttctttgtttgcaccctgaaaaacggcaggattgctggtgatgatatcatcgtcgtgtcgggtagtggcaggggatcgacaggggttaccaaagtcgcgggctaacatggatgaaggtagatgttcacacgtactgcgaaggggcagagcggccaaaggtcttggaaccaggttggaacagcttattattagtaagagatggtttagagaaaaagtcccattgtcgtagtggcacgattcgttggtacacggggggagattacaaaatccggggaagcgggtctgtgggttcgcgagagaatcaatacaacttcatttgcttccttaaaaaagagaaaaaaaatggtggccttccccaattttgtgtcacaagtgataggcagatctactcgtctaaaccaaccgcttaacgggatatatacacatgcgttgttagcgaatctcgactcggtcctaccccaaacgaagggaccaggcgggccaacacctgttaggattcctttgttctttgagaactcgccctggctcgaacgcacgctctctcaagttctggcggtcaacggaaggtacagccttgggcctagagactgcaccaacggtcatattccactgagctaagtggggcttggggtgaaataactgcccgttctgttcatcataacagagccttttttaatcttcctagtgatttgattggctggatcttgttgttctcagttaggtaatcttgaagctattcaggtatctgaccttcacccgctctgccccctcacccctcgcatacgtactcctgagtccttactccgtagtgtcacagtatcaaccttccaaagttgtaaatctgaatattccataatgtgaaatgacatggatgtgatgacatggatgtatccagggaagatagtcaggggagaccgtcaaattaaactttgagagggtccgggatctcaggggtaaactcacacgtttggatcagcacccggacatttgttactttgatctgcttctcgaagccagggtcttacagaggaatgtatgtatgttgtggatgaatttggaaataattttatacaactctaccctgatatacatgtgccttgacgaccgtgcggattcccactcggcaatgaattactacttagcaggacaaaatcctagcggctgcggcttcagcaaccaccatgacagcagcttggatattaccggtcgggaggtcgggatggatactagcgtcgacaatgaactgaaaaaagggttagtatcatctttcgagcaacgtaacattctggacttacaaggttatccactccatagaccttggtattagtatcgacaacggaagtgccgcccttacggccatcatcggtacccatcttcgcagtgctggtgtagtggataccagcagtttgagaccccaagatggctgagacattggtgtaagtctcaagctcaaagccagtggatggggcggtgatgctgttgaccatcttctgaataaaagtacgggcggccttctggtcagcagcggtctggaggtagggcgacttcacaataacagtatttccgctggcatcaagtcccaggacaccggacgaggtgaggccgtgagtcatgtacgtggtgatggtgaccacgccttcactagtaggtgcgcacgagccctggtagtactgggtgtggccatcaatctcctccgaggtgaagaagatcatgcggtgcttgccctgggtcagtacaccgctgtgattgcggtagagggaaatatcgctagagtcggttccgttaaggacgccgtcgtagtcaacaaggccaaatgaggcgttggtgttgaagacgatcgagaaaatggggtggtccttcagaccgacaccaacaggcaggtcaatccactgggccttgggaggaacggtaactccgctcttcttcgcagtctcaatctgggcctggccaccaataccagagttccacaacagacgtggagtagacaaagcaccggaagccagcaccacgcgaccatgtggggcaatagtgatgatctcagagccgcccgaggcagtctgcacctcgacgccagtgacctgactaccggaacggaccaagcgaatgactttggtttggagagcaaggtggaagttatctagcttggtagcatcgggtagatatgtgcgaacagggccagcacgcatctggttcttcacgttccaggccgggtagctgtagacctggtgcttctcattcggctgggcgatcatatccaccgacttccaaccaagaccaccgaggaacttggacagcacaccataaagagcctggtcatatcgcttgccgtcggcagagggcaggatggttccagggttgcgtttgtagagtcggtctgcagccgactggacatccttccacttccagcccttgggccacttgtcgtcgaagtcgcgggctggtgggtgaacaaagaccatgtagttgactgttacaccaccgccgagcacacaggcagcagtgccagcagtgtcggtacacacatactggttccagacatcgagcgagccgatgtcagccgacagtcccgggagatcgatgggagtcaatgagtggtcccatgtcagggtctcattgtttccggtggccactgttggtccgacacctcgctcaaggagcagaactttctttcctgcctgggcgaacttctcggcgctgatgattccggaagggccaccaccgaccacaatatagtcataggtgtgattctggaagacggaagcggaggcagctgttgtaaaaacagagagagaaatggctagagagccagcttggaagatcctcattttgacgtgtacgagggaataagatctcactgaaatcccgatctataaatcttgtcgggggagttggccattttaactgttccacaacgagtccgtcacaccggtacagtcgaactcggtggatcaattgttgaagacttggcacgcgagcgaaacatggcgaaacgtggctcgtcgtgggtttaatttcgtcgaatgtcaccgattaggtatagtgcgatcagataagagaactaacttttcttgttcctgaaccagcccactgggtgaacatctggaattttctgggttcttgtctgataatcatagagaaaaaatagcacgcctttgaaactacactatacctttgttgtatgccaaattaggtatgttggccttgaagttgtagcgcttaaagtggcgccgttttaagaagtctcggaccgaacatgcatccacttcaatcattactttgattcagttctcggagtagacataccgaaagggtctgtgttccgctcattcttccgggatagggtttccccagccaagtctgccgctgacgtagagataatcaatctcgagctttagggtatatttttctgaactttgattagtgtatcctatggaagaggcgtcgagaaacagggtactcgatcgagttctctttctctctcagccaccgtcccacatataccttggcagttctattgtagatactgtatgtcacaaagttctagaacacttaccaagtggatagtggatatcatgagaattcctaacgtccttaccaagcatgcaataagcagaattgccgcgagacccacttcgattaatcatgcattatcaatttagggaagtagtaacaacctgagggttccatccaagcaagctcatactttctagtcggcatgtttttctcccgcgccgaaattctgctagacatgctgacccccacagaatggggcgaagctgtcagatatgccatgctgtactccatatatcgtagcagctctattctcgcctttccaggaacatccggttggctcggatcgtatcgcgatccagtgatggtagtatggtagtagtgccgacaataggccgaaccgtgaatttcttttgaaacacatccttcgtttcatatagtaaggggcgaagcttgcaatagtgtcccaagagaatatcggcatatggacagataatcggctactgctaataatgcaggcattaatgtaaaacttgaaaatatgagtggaaggccgcttataagctcgcgtgaccaattcctttgtcgtgaaaccaggattcgagatatatatctccgaagtttaccgtcatatgctcttggtgctatatttcgtgactaaagcattgctacccacgataaattccaacgagtacccgagtttgtgtctggctcaattcaattaacagagaactagttggagacataccctaaaggtgtagcatataacatgacgtcatatgctatgagcttgtggtttgagttgaacaagtccataatcagtctctgactatgactgtggccaaaagattcggtccaagtgctactgacagcaacaagcattaagatattgagggttttgtaaattcccacttgaatatgagacaagatggggaatatgagggtcaacaaaagagtggggctaaccgttgcggaagctcaacatctccaacatcccttgtaccaaccaaggcgagatcacgcttaagatcactctcctctaggaagaaaatggcgggatcagccggccgccttataccggcatcttcacgcactcttctcctcaccttcgacgcgttcggcaccctcttccacccacgtctccccgtccccgaacaatatgccgcgaccgcgcaccaattcggattatcgcgcactgccgtcaccccggacaaacttgaaaccgccttccgggataccttccgtgcacagtcacatcggtatccaaattatggtcgcgcggaagctctccgaggtcaatacggggggccgaggcagtggtgggaggaggtaatcagggggagtttcaagcgtgttttggctgcagagaatggagagacgcgccccggagacccagaagaacatatttctgatcgcatggtggaagccttactagatcgatttgctggttccgaggggtacgcgctctttgacgatgtgctacccttcttccgccgaatgcgcaaactaaaggctgcgcataagtggtcgtttgataggataattgtgggcgtgatatcgaactcggatgaccgagtgcccgctgtgctgaagtcgctggggctgacagttggtgatatgcgcgccgaccaggatcgatcgagtatggatcttcctgggtttgagggacgaagtatcaacaacgatgctgccgaggaacacgttaaagatcatgcagaccgcaacttggacctcgatatcgatatggtcattacgagttatgaggccggtcaatcgaaacctcatcgcttgatcttcgacgtggcgagacggcaggctctaaaggttgcccgcccatggttgaccagcagaaccaaatttagttctgtgcatgtgggggatgatttaaaaaaggatgctcaggctgccagggatgcaggctgggagagctacttgcttcttcgagatcatgttagttacaataaccttgactcgaaggaacttccagatctcctcaagtttgcagataaattggagctttttccataaaagcactggccacagcgagcagatgaacagttgaacttgatcaaagtcaatcatggatcatatcaaaccacaagtgaaggaaatacctacgaagttccttgagctctatggaacatcacttgccctaaactgatacaacgacaacatacgaaattcttgacagaccatgagtctgtgctcctcaccctcgggctttagcttgatgcttcgcttcctgaaacacaccacaccgcctttctctacattagagcttcctggcaccgacgacctggatgtttttgcttctccacaagcacccaaagcgcaatctcgaggccagcctcaaaaatcgtgctggtttcgggtttggttcattcgcatccacgacagggtctattctttcggacagcccacagcaccgaaattaattgaaaatggctgcccgaacggcttcactcgattggttgacgtcaatgtggttgtattgctctatttattactgcggaggggcataaagtaataggaagtaactatgtggtggatatctagatagaaaaattatatccaaagatattgtatattcagttagctattccatttctttgcgaggcttcatcctccattcaggacagagatcaacgactcttttatacaacgcgataccgaaaatggctagttcaggtctgtcatatacacaaccaatcaaaatctcgtacggagtacaccccgcatatccggtacggagaagacaccgaactgcgcttggatctccgtcctggttcgcgaattggtcctgcttcattacctcaatttatcaaagtcttgaaactcgacgcagaagtcccactctgctttgacattcaagatggaaggggttcaaaagccacaggggtctgttgtaatcatcggagctggtactcaaggtagacgtcttgcgcacatggtaagtgctgatgatcaataccataaacatctgcattggtattaaagtattgaagtggtcgagccgaggcggcaccgtccgtctggtagatccccaagagaaacagcttcaagatggtctgaagtacgtggaacaacttcgtgcggatgctaccaaccacgaagggaattgggggaagattgagacatcccagccctcttctttgcaatctacactaaaagtgcatggctcgttgttgaggtatgacttaactctttaccaatagcactcatttattgacatggcttgatagtgtgtgccggagaacttggaccttaagcgaaaagttatcactcaacttgatgagcttgcacctgaagatacaatcattgcttcgaactcgagtagctacggaatctttgagattatcgatggcatgagcttgaagaacaacaagagaattatgagcgcgcactgctgtaggtgactatatgctaaatggaatatttcgctaacacctagtgtcagattggccgccagagacatccggtaatgcctattccaaattatagccttttcttcaaattgctaacttgggagtcagcaattgaaatcatgggccacaaggatagcgatcctaagctgattgagctcgtcctggagcaatgtaaagaacatgggttctcgcctttctacgtcaaaaaagactctgtcggctacatatacaacaggtgagttattcttctccctctctattactacccgatcaggtttctaacaatcttccagaatctgggctgctatcaagcgagagactctgctcacattgtctgaaggtgttgccacacccaaagaaatcgatgccattttcaaagacgtcttgaagacgcccaagggcccatgtgaacagatggatgttgtcggcttggatgtggtgttggacatcgagaatcactacgccgagtctcggagcggaattcctacagagccgcgagactaccttcgggagatgattcaaggtggaagtctgggtgtcaaaaatggccggggattttacgactatgaagaacaaaagaagtgaatgtttctatagactaacattgatctattctgtcgtttgacatgaaatgccctcttataacttaatagtgaagtcccactataaccaacgaatcagctctcagatccgcctggtacctcagcatcattggtctagtggtagaattcgtcgttgccatcgacgaggcccgtgttcgattcacggatgatgcacatctttttttgctttttcttcgttatagagcaaaaagagaaaaatgtactccgtagattgctcccatttggaaaggtcgctagaaaaatatgcaatctaaatcgttgattgaatatgtagcggatctatcatgaacaaaacgcctaatgcccgaactccatgttaccctaaccccgggaaaccaatcccattccatcataacataacaaggcaaatccatgcccatgcagaaagaaagacatcaaattcatcatccactcagtcccattggcccttatccaacgcacccaaaccaccaccagtatgcttacccagcaacttggcaatgttggaccccccgctgcgctgcttgatacggagctccttttcacgctcacgctcacgggcagctgtgtacgagttgacggcaccgcccttcttaggacccgaagctgcaggtttggtgacacggttggaggtggtcgaactactagaagatgaagagcctgatgtaacacgacgtagaagttgaggagggcggaatccaatgggaccctctccgccgctgccgctgtggaatgcaagcttggagtttgtaggaccagagttggtggatgtggcggagttggacgatgcttgtcggaggagtgcaaggcggtcgaccacgactccgcgcgtgcggcgtgggtggctaggtttgatgaaggtattgtccgattgcggttgatcgtgatcaccttgggcttcttccgcgccgggagtttcatcatctccttgctcgtgttctgcctcatcaagtgaagcatcgtcctggaaggagtcgtattcgaaggtttcagtgaggaaggacaacgtttcgcggatctctgctattgtggctggtttctttgacattgcgctagcaggggtgcgacggaggcgaggcggcagacggttggttgcatcttcagcggatggctcgagagggcgcttgcgactctgaccatcgctcgtcgcatcattcgactgctctcctgaaacggggacctgcggagtttctgtttgggagccgttctcttcttcctcaaggaagtcgatattgaagtcatcatcaatttcgcgatcctcaacggccttgaagaatgcggccttcttggggttgtcggcaatctcgccgattttctcgtctgcaaggagagcgcggcgcatcttagcgaactcgcgctgcttctcacgacgacgtgctaggagctcatcatccgagtcatcaaggtcaaagtcgtcatccacatttttgcgacgacggagggctccagtggtgatgtctctcatcaatttggcgacatctttctcgtcgcggttgcggtcgtgaatcctgtaagaatgttagcatcttctcattgaaaatatatcaagtttgaacatacgcgttgagtgcggccagttgcttctcatcgaccacctcgccactgttgtcattgatcatttggcgatcaacggcattttcttcgccatcgctttcgtcactgtgacctccaaggcctgcatattcatcttcggattcttcggctgcctcatcgataatgtctttcgccttgctggttttcttgtcgtattgcataacatgattcttctttgcagccttatctttcttcatgacattgaaagcgttggcatcgatttcaaagtcaccttcgttattattctcgtcgacttgaacaagttcacttgcacgtcctcgccgcaacattttgcgcttgcgttcagcaatgggcgactgagtttggcccacaaggaccgtgtcgatggtagacatgggtggggtagccttgaatctctttgcaggatcgaatggtgagaatacaaagccctcgtcctgggttgggtcgggcagctgggattgagaatactctgagaaggcatatggtgcaggcgactccgatactcgggtcacactctgcgtgtagctctctataaagttattatcctgggtctgcggctggctgtctggaacaagaacttctgaatcctcctttcgaagttgaggaacaggctgaccagggtctgggagagagaaggggatggtggcagattcttcttgggtaccaacgccattaccatccaacgtggaggcaaatgcctgggtaagacctagggacatatcgcctagtgtgcccatgccaaggaagttgggtcgttcgacggattgcgggacaaaactcggggctctcacaggcgttgagggtgcttgtggttgatcatcatcttcgtcatcgctaactactagagttcgtcgcttccgtctcagggcaggcatctcgttctctgcatctgaaggagcgacctcactctcgtcgtcagccgaatcgtcgtcttcgtcggcctcctcttcgacgagatccccgccaccattgacgcgctcgttttcttcctcttggtcatcttcatcgtccgcttcaacatcaccctcctgatcagagccggaaagcacgtagtcatcatcctcttcttcatcgtcgtcaccattagccttcttcatggcagctttctccagtcggcgaatttcatctccctccttgcgcgctttctcaacaaggttttccatgtcatcctccatcgctgcacgctcctcggctgtttcaatgacaactcccttggccctgagctcatccagccgctcctggcgctccttggccgcttgctgtcgggcccgccataatagatttgcggaaagctctgcggagttcatggaagccatttttcgggtaggagatgccaggtgtgccaatgccttgagcttggtcatagaggggtcttcctgtgcctgtctagtaggcaggttttcgaacgctgcaatgccacggcacttgccaggggatgttatcacctcaagatcgctatcggaatcgtctacatcgttctggtgcgcagcaacctctttcctagaaagcaggacgcggataggtcgttgtgtcagtggtcggaaaactctcttcgattctgcaccatcggatttagattcgggtacagaggccgatacatcttgaactgaagggccctcgaacaattcaggatactgatttggcgccataaggacattcggatcaggcaaaccttcattgtccgtatccatatccatatccacatcttttgcttgagtttgggcatgcccagaattagcggtcgacttagtggaatccaaatgaccgagaactggagaagtatgcggagtgtctttcgttttgttgtgtagttctccgtcagaggaattttgtgatccgaccgctgacgatgaatttgccgcgagctgctcgaccgggggatcgggttgcatgaagttgaatttcgcgaagaggctctccttggtgatcttcttttttgtcttggcctggtgagctaattgcatgttacggctcattcgctgagtctcctgcttcatctcatccagtgccttcttgctggctttccgcggctgacgagccttctgggagagcttgctggcagaacgaggatcgtcagcaccgctctcctcgcctgacactatctgcgaactgaattgttccagctgaacttttcggatggccttcttagtttcggcatcggccttctcgcgctcctcacgttccttgcgcttttgggcaacaagagacaggaaacgggcgtttcctctaggcttcttctcttctgcattttctgtgtcttcgttttcggtgtgtaggtcgtcatgcggttcgcctggagaggatacaaagagaggagagtcggctcttgaacgagaaggggtttggctcgttctgttgtcgggcctgggggagttggttgtggatttgtgctttctcctcggaccggccgtaggtagatcatcatcactggattcgtcgatgggtgtaggttgtggttctgtctgctgtggcttctcgccctgttctttttctgatcgaaaggcctttgacacacgggcaaatgcagaatttccgtcctcggtttcagctgacctggaattaccctgtaaacgagcagccatacggccttttggtcgaaaaacctcatctgcgctagctgattcgtctgagtcgtgcaataggtcattctcgcgtgtattggcgtcccggactaaaccacgccctagatcaagcttcgagacagcatctgttgacttggcaatttgagtatcatcctccgaatcgctatcgaatgctgccatcatggccttgatcttctggccaggagtgataatggtcggcgaatcgcccgcgggcgacacggaacgcgtcgaccgtggtgtggatggcgaggacatggcgcgaatattatggtgaattacggtgtgttttaggaaataattcccatactgatatcaattgtacttggaggcaatctttaagacgtccaagattcagaatgaggtagagtggacgctaggttcaagggcgcatagtctgaacgcgaggcgcgttcctcgcgttgctaggtcatacacgtgaccttatcttacttatcgcctcatttctctcaagcggacgttaattgattattgttacaggcacgaagaggagtagtagatgatattttctcttttaatctatttttgtgagtttttattattttcgaattatctcttcctgtagataaatgctgcgctgctaacatcgaccggagtattgctcatgctgcaagcttgatgccattttctgaatagacgccgagaccacccacagactcctcaaaaatcgcgcaaggaaaaaataacaagcaaaagatacaatacaattcgggcaaggctttatgccagtcaccagaaagaaatgtacacttgttcggggaatcatggaatctcagaaccagagaatctttctcacacgtagtaaatcggttcaccaaacaacagtctgaaccgaagagcaggaaaagtcggcatttccgaatcagactagatctcgatgtcgatgtccatatccagcgctgcaatgttctcgtcgtcggtgttgcggtaagtaatcatgaagccattctttggcttctttgtagtgatgcgaggggcggaagctcccttttgcacggcttttgcgggggtatctttttggttttccacaggagcggcgtcggcagcagcgggtttgggtgttccgttgacatcgtggtgagttttcgccacggttcgcacgcgcatgaagggattcggggcagcctctccacgtgcaacagcctcggctgcctttctagcggcctttctttcctccagctgagcacggcgaacgttctcaatgttaagcttctggttgcgaaggttcatcaagtggactcgttcggcttccgatagaccactatcgacctctttcttgacaaggcttgttccccaggatagggtcggattgaccattttctgtagttctgcctcgattttctcggcctcctccatgtctccgttgaccttggcgaattccaggtttctttcgagttcaagccggttgagcacgttcttcttgtggtcgaaagcaccctggcgacggagtttctcgttcaactcctcccgagtgaaggtgtggttcaggaggcggttgatatcagcgaccttagactcaaccttaccctttgtagccagcttgcaatcctcaacagcgagagtctgaacgtaacggcggtactcggcctaattgactgttagttggcttccaagcttcgaggggaaggaacaaacctcagtaagtggagagttggaaaaagtgacaaatgggaagtctctgacagactttccatgtgccagcttgacatactgatccgtgacaaatgagcggccgttttcgccctccaaggcgtacggcttgccctgagagattcctagggaaatgtcagcgcgcacaaacgagcgaggcagcataagttcttaccagtaatcaggcccaggcgatactcattctggccggtctccgggtgcgggccaatgctcaaccgagcgtagcaaccaatcatagcagtctcaaatccagggtagaagcaaactttggcaaagttattacgtccaatttgagcgcgtcgaatttcgcgaagctcggcgggcgggtcatccttgggaatcgcagcagactggccaacgcggtcatccaattcaagatcactctcggcatcagcatcttcatccgaaatatcagaccccatggagcgcgaacggcggcgcgactttgtagggtctcggcgacgaagttcatcccgcttgcccttttgctcacgctggcgcttgtaggcctcgatggctccggacgtttctcctactttgcgaccaccaagagtggtcttctggcgcgagctcttgcgctggttgtcgtccaagccagcggaccctgcctttcgcttggctttcttggccgctcgtgcttcctcgcgcgagcgagatgctagaaggcgacgtagagccagatcttggttgtggcgatcgacttgctgggcacgttcggacagggtttcctcgcgctggatctcaggcatggccatgatgtccttcttatcctgggccgagtagtacaacttttcatatgggaaaatggggcgatccgcatcgttgtcatccgaattgtcggcctctgactcggactcggacatgggggcggactgaagcgagtgacgagatccatcgtcagacctaaatatatggtcaggttaatgagactcttggctatcaatatggaggggcactgctcacacttcaccctcggattcatccttgggcttgcgcgatcggcggcccactgatttagcagttcctttgcgacccatggctgcaggtgaggtacggtcttgggtgtgtgaagaagcagagtgcgctggtgatttggggggtggtgaagtttcctcctcagagtcacccgccaacgcgagcagctcggcatccaaatcgtctgccattgtgaatatcgaacgcagttataccctctcaacagaaatcaatcaatatgagacctataacaacaggcattcaacagcactatgacaataggagtattcgtactcctatagacttcttccctcctttccaggagtcgttccaaaattggagaagtaggcaagaggggcgaacggtggcccaaaatgcctgttctgaatgaaggaatgtcccaaatttgacagactctctgtataaggcacaaagggagtacagagtggaggatatcgtaaaaaagcacgcatcaacttcatgacgttcaatgccaagcccgataataggcgcgcggtagcgagaaggcggtctaagcgacgaacgcgcgacctccgagcttcgtccctcgaatcggcttcattagtagcctaatttaattcctcgatgttgtctttaccgattctgcgcaggagcgccttgtcgcattgccgatattctgcaccggcagccactccaatctttctcgatttcctcgtgccgtcaacacttaagcatggccaatgtcggcaggcgtcaactaccgccggcacccccggcggctccaaacctctatatgttcttagcaaagagcaacgggaattcatggacggcgctctgcgagtgaatcaagccggtgaactcgccgcgacgctgatctacaaggcgcaaacgcctcagatcgtccgctcatacccgcacctccgacccttgatgaaacacatgtacgaccaggaagcagggcacctgaagaccttcaaccacctcattgccaagcaccagatccgtccgaccgccatgtatcccgcatgggaggtagctgccacatttttgggttggtcaactgcggcattgggtcgcgaagctgcgatggcgtgcaccgaggccgtggagactgaaattggatcacactacaacgaccaagtaagagagattctatcttgggaggctgatgccgagaagcgaggggaggagctggatgaggaactcaaggaaatgctggccacattccggagaattcgcgacgaggaactagaacatctcgaccatgcggtggccaacgattcgaaggaagcgaagccctacgatccgctcgtcgatgtcattcggtttggatgcagggccgctatcaagatcagcgagaagatctgatctggtaattcggaacgcatgtgccggggttgccctgccatatatattttgccgtctaggaccatgtactataccgactacttctctcagtattgctagctatacttaacattgtacattctaattgccggttatgtccgatctaatctaatctatcactcgccgcagggtatcaataaataaccgccttcactaggctcatggtctctgacttttatccccagtgtgtgaccagcgccgctcactcagagtcaatgagctcttgccccaagtaatccatgaagttttgggtgaatctcacaacctgctggtagacctcctcgaatccattagcacccccatagtaaggatcattcaccacctcaccaccgccaatgcgctcgtgcagttttccacccttgccgaaatcgccaaacaatcgcacctcagcaaccttcgcatccgccccatatgtaccgatggcagcatccacgtgcgaccgcgtgctccttgaacttggcttgttgtctgtcttcctctgcagagtcgcaatgacggattcgcgcacatcctgcagctcgcggagattggacttgtccatagcgaggaggtagtcaaaggtgagaaagtcttcccttgtcacttttcgggcggcatgctcgtaatcgtgtattttatggcggcgcagcgtagacatggtgcgggagtcgggcggctcgaggctgtgataggcggctgtaccagcggagtcaatctcaccgatggaggggtgggcgccggccaggttacggaacactccttcggccatgggagaacgacctagacaggattagcatgtcgtaatagcggagaagaaccgagttgatgacgaacagatgtttcccaggcagacaaataacactttggcgggacgcgcattcgagtcggaagccatggtggggtagcagggatcacgaaggaatcttgattttaagattttcaagatatgcggagcaaggaaatatatgcagaagtaagaatcaaagcaggcgatagtatacaattttcatgagggtcgaatttgggtgcaaggcgggggacattgatagaccctggttggggtctccacccctgggagagccatggatatacaaccgttgtcttcattcgacgttgacttgcattgctacacatatgttgtacatcataaagcaggaacaagcaagaaatgagttgtagattggcagctgtctattttatttttattttttcttccaattaaaaaaagaaaagaagagtacatagcccactatgtcacctccaatgacctcagatctaaaaaaagaaatcgatggctgaggggggatgagccacaggtgacaagcccgtgtggctgagttccagtcagttggcccagtaacaccgtccaagtggagttcgtggagtttctcctcttcaacaacccgtggctcactggtttcagcacatccagggttcctgaattgcaatatcattagggcttttatttctgaatcggaagaatctgttcccccctcttgccccccgacatctctacggtgtatgcaggcctaatcagtgtacggtatctccacaaggcacaaggcagtgcggagccgcacagacacatctgattcgccccagatccaccatcgttgccggaatcaaaggcgtcgtaaacaacagtgcggccaagccggagttattccacattttttttcaaagctgttcttcttcaccctccgcgctgtcttgtgacaacccaaaatacatatacggagtaccatctccttatatcaattttcgcttgcgatctcccttctgaaacaacgccgagaacttgcatacgtcaattggactagtgattcctcccgctgacgcttaaatcccactcagcgctcctagcgcaatctccaacaaccctgttacgcacttggggcgggataatttcgctgaactcgattctaaggccccagcattatggcctacaatcgtgtggacgccggtcagtgcttctctagttttattggacctttcctcctccctctctcttttcagcttccccgcgcattctccatctttctgaactgccgactcagtgctggtcattgattcaatggtcccagtacgatttgcgcgatcaaatcattgctactcaagctcttattgagcaatcttctacgtcgcaaaactaacaatgccgccaacagacccgttcggagacgagcatacctcgcccatcttgcatccctcccatctcaccggatacagccatcgccctccttccccagggcaaccattggaacctggctaccagctctcggacaacccatatacatatgcgccccagtcgcatcttgtgatgccatccagtgatcgcttggccgaacaacctactgtgagtattatgagataagagcgaagattgctacgatgagtactgattatctatctaaaaagtactcggtcgaacatgttgatagctcttatggccatcatcccgcatacgacgcacaacgtccctaccctggtcacgagtattcgcttgaccctgaagcccatcacgacgcctactatacccaaccctacgagccgacacaaaccccacatgatgattatgatctaggccagtacccagagggaggacaaactccctttgaagctgaccagcccatcctgcaaacgggcgaaaacccctttgggccggacccatacaccgagttccacgatgaaccgcgcccgacgcccagcccagcgcctcttcgccgctggaagacggtgaaagaagtccaacttttcaacggcaacctcgtccttgattgccccattgcgccgcgactgctcagccagataccccacgcagaggccccaggtcgcgatgaatttacgcacatgcgatattcggcagcgacatgcgatcctgctgatttcttcgaagagcggtttaccctccgtcagaagcttttcgcaaagcctcgcaacaccgaactgttcattgccgtgaccatgtacaacgaagatgacttcctcttcgcgcgcacaatgtctggtgtgtttaagaatattgatcacatgtgttcgcgcacaagcagcaaaacgtggggcaaggattcgtggaagaagattgtagtctgtatcattagcgacggtcgtgccaagatcaacccccggacgcgcgctgtgctggcagctctgggtgtgtaccaggatggaattgcgaagcaacaagtcaacggaaaggacgtgactgcgcatatttacgagtacaccactcaagttgggttggaggtaaagggcactcaagtgcatctcaagcctcgatccggcccgcctgtgcagctgattttttgcttgaaggaaaaaaatcagaagaaaatcaattctcatagatggttcttccaagctttcggccgtgtcttggatcccaacatctgtgtccttttggatgcaggtaccaagcctggcaaagactcgatctatcacctctggaaggctttcgatgtcgagcccatgtgcggtggtgcatgtggtgagatcaaggttatgctgtcccacggcaagaaattgctgaacccgctggtggctggccagaacttcgagtacaagcttagcaacattctcgataaaccgcttgagtcttcattcggtttcattactgtgctacctggtgcgttctccgcctaccggtttgtcgcactccaaaacgacaagaacgggcaaggtccactagagcgatacttcctaggcgaaaagatgcacggtgccaatgccggtatcttcacagccaacatgtacttggctgaggatcgaatcctgtgcttcgagattgtctccaagcggaagtgccgatggcttcttcagtacgtcaagtcgtcgactggtgaaaccgacgtgcctgatcagatggccgagttcattcttcagcgtcgtcgttggctgaatggcagtttcttcgctgcagtttacgccattacccacttctaccagatcttccgtagtgatcacagcttcattcgcaagtttatgctgatgattgaattcgtctatcagacgattgcgatgattttcgcgtggttcggaattgtacgaatctctcccatcatttttttgatatatgctaacgccttgcgcagggtaacttcttcttggtcttccacatcttgaccacatatttgggctcagatgatctactgggtactgctggtaaagttctcggcattatctttgagtggctatacctggcaactctcgttacgtgcttcgttctagctctcggtaatcgacccggcggatcaaacaagttctacatgaccatggtatacttctggattgtgatcatgatataccttgcattcgctgcggtattcgtcacggtcaaatcaatccaaacagaggtcgaatcgaacacctttacagtcagccaactgttcaccaataagacgttcttttccatcatcgtctcccttggatcgacctatgtcatgtggttcctcgcctcgttcatcttcctggacccatggcacatgttcactagtgtaagtgactatatgaatttaatcttgtacaatcttctaacatcctccagttcattcaatacatcttgctcacgccaacctacatcaatgtcctcaacatctacgccttctgcaacacccacgatatcacatggggtactaagggagatgacaaggccgagaaactgccctccgcgcacctcaagcccggcggtaaggtcgacgtcaacattccacaggacgacggcgatctgaacgaccagtatgatgcggagcttgccaagttctccatgaagccccccaaggagatcacagttatttccgaggaagaaaagcaagccgactactacaagggattccgcagtgccgtcgtgctcgcctgggtattctgcaactttgctcttggtgccgttgttctgagcgctgccggtttggaaaccttcgacgacacatccactaccagttccgatgatgcgcagaccgaacgctccatgatttacatggaagttgttctctggagtgttgctggtctttcgatgttcaagtttatgggtgcaatgtggtatctggttgttcgtatggtgagttgtcttcctcgcaaggtttttttttttttcattacgtactaacattatattctagttccgtggcgtttgattcagcgagctcttaaacatgatgattgtgttcctttgcgccaatgctatgttttcatatatcccctgattttatccggatttggtcttggttacaataccacggcgggcccggtctggtacgcaaatgaaaatggaaatggaaatctaatatgtttgatgacttcccagcgatgtgtttttcgtcctttgtgacacgcggaatggctgttttggttttttctttacatctcgacttggtgcatcttttgcatgtgcttgcccttgcatatgtatccttgggctcatgcttttgcttttattttatggagtggaatttgtgtactctatctgtcgatatggaggagaatattatttccgccaattctgtgttcattgcaaagaaactgtatttttgtaggtcaacccgaagcatcacatgaactacgcaataaaagtcagggtttagttttgcgaggtttcaattattgaatatagtgatatccttccattaactatgaacttcactatgaggtactaaaaaagcatcgtccaacaagtgtctagtgcaccaagtaaattagcaccaactccgtaacccgaatcgaacatgatttcaagaagcctgattcttagaatgcacacataatgcaatccctccaagtaccagccccatccccaaccaagtctccttcgcaatcaccttgcggtcaacataccactccccaagaaccgtaaacaagaacgcactcgagtttgccagcggcacagtcaaagaaagttctacacagcaatacattagcaattccgcaccccaaacggcaacactagaacctgagagcaaagaaagccaatagcactcaccatgtttcccaacaagcaaaaaaaaccaaatactgcccgtgaggttgataaccaagggaatcgcatatgcaggtgtacggagcagattaacaaccgtccagaaaacagaaacaatcttcgcccgcagccacgactgcttcaccggacctccatgtctccacgccggcatgggcacatcgtcctcgtcctcgtctgcgccgccttccctgtcttccctatcacggctcccgctctgttcagcaagtccagtatcctgacccgcggtcttcggtttccggttcacgtcactgctcgtactccgtcttggcacatcggcaccggagtcgctgtcttcttcttcccgagagagcaattcctgtgcctcgcccgcgtctgtgaacccggctcgtgccgagtcttgtgagcgtcttcttctgcgcgctgaggtgtttgggtcatttgcttgcttcgcttgccgggcgttgaagtctgctgctgcgcgccggataaagggggttgtgaagccccatgcgacgccgacgaggaggaaggagagcacgtagttgaagacagagggggcgggttcgatggggattccgggatctggatccatgttggtgttttgggacctcgaagggtgtgtaacgattggttggtttgttgcgcggtgttactgcggccttgacgttgatgcagacgtggaccgttggtctgtgcgttactgataagacggataaggtttctagtgacgatccttggatctataaaatggatccaacggttggaatgctttattttaaccacagtagattgatatagtattgaagagactgagtaaaatgataagatattagactggttcgcctgttagggtttcacaccgtggaggcttcaatcacgtctgaacgaatcgacgaattgaccagtcaattgccaacaacccacaacccacagccaacagccaacagtcaacggacaacggacaacggacaatatataacaaccaacagccagcaaccagcaaccagcaaccagcaattagcagccagcggccagcggccaacagccaacagccaacagacaacggccaacagccaacagacaacagacaacagacaacagccaacagccaataaataacccacagcccacacccacaagctcacaaggatactgcacaagataagcatcaagtgcagaatttgctctcagtaggtcaattgcgagcctccgatcaagcttgcccggccgtcacagagggtgtcgccacgtccgatggatgtgcatcatcaagaccgattcatcacagagcaaagtgcccaccaccctccttctcccccgaacccacttccaccagagtccacagcaccagaagagcagatctcctatgtccgttgcttaggcgaacgccgaggcttgagaagacgaacgccccactgtgtccgagaaacgagtcctggtgtgcttcatatctctgacgcgctcaaacggtcgcccgtgcagcgtccccctatctctcaccagcagctcatcctcctctttatgtgtcctcactggcatcttgaaccgtggcagtccctgccaaaccccaccgttctctcaccagcagcccatcctcctctttatgtgtcctcactggcatcttgaaccgtggcagcccctgccaaaccccatgtgtcctcactggcatcttgaaccgtggcagtccctgccaaaccccaccgttctctcaccagcagcccatcctcctctttatgtgtcctcactggcatcttgaaccgtggcagtccctgccaaaccccaccgttctctcaccagcagcccatcctcctctttatgtgtcctcactggcatcttgaaccgtggcagcccgctgcccatcccccttcagtgccgctcgtcacaggtgagtctgctgtcgaatgcccccgccagttgtcctccaccgtcgtcccccactgtcgtccccgtcgtgtccccatcgttccaggtgagtctggtgttgaagtgttagtgtcctagtgttagtgttgttagtgtgaagtaccattgtcattgtcaagtgttagtgtggaagggttagtgtagacgggtaagtgtaggagggtaagggaggaagtgttagtagggtgttagtatggaagtcctaatatggaagtgtcagtatcaaagtcaagtgccaagtgtcaagtgtcctacctggtgtcgaagtgtcgtggtgtggcggtgtgcggtgtcgcaagcaaagaaaggtgaagtggaagagaaagaaagagagaagaaggaaattggggggtagggggtatttatagcttgtgggaaacagcacaacctctgaaatgggaaggcacgtaaagacctactggcacgtgaaataggcaggtgcatgtcaataccctgtcattgttacctcaatcctattcaagaacaatggatatcatggtttttatatgtcctacttgcttgcccgggactctagatattcacgagatagtcaatgtattgtcttagctacagtctatagaccttgaggatgtcccgatctgaagggcccatccttcctgctgggtcgttccttccctttctgccgaagagctaagcgagttgatcaagagtttgcatgatttgcagggaggcacaccgtaaagcccttcaccctacaccctacaccctatacgcacagatcctcgtccatatttctttttgctctcttgtacttaattttttgattgaaatgactgcactctttggttttaataagtggctcgtcgtaggagacatcgaatatcaaggcacggtctgtggtagattgcacatgtcacgctattcatatctaggaattatacgctacgggagtcacccaagtaaccagtaagatgtgtagtatctattagcacgtcctgtgtgagctttcgtctttaattctctcagagatatatccagttgcaccatatagtccgcgatgaagaaccaatgctaatgagaagctcattatccacttgacagattgggaggtcggcctactgtggagatgtgagcatggctcctgagaatggcttatggtactttgcagtatgaagaagcttaattttacggttgcaattggtacttgagtagaattaatttgacacgaacgggtatcatgaagtgatatatatgccaagacatatatatgtagtgtattaggacaatgtctctatgcaacgcagtgtaaaagactcgatataaccaaatgtaacatagatatacagcaacatcagtagctggcccaaaaaaaaaaacattagaaggaaagacaaaaacaccgaaaaatgggaaatattagcatggaggcagtgacacaattacttggcactcttcgatttcttcccaggaatgaatttcatcatcgaggccttcagatccgcactgttccaccgcttcacgcggacaagatagtacatgagggtagccacgaaggtgttgaaaagaatgaaagcccacataataccgaagttgcgccaccgatcaccgtagtagataccggccgtttccatgaactgatccgcaactttgagagagcagtagccgcactcactcgtggcgtcgggattagttatctgtccaccagcggcggcggcatacttcatgaggtactgcccgcaagtatagccagagggaggattgaagatggctagttcggcggtcgagcacaccacctgacgattgtgaagctgtgtgcttgccatgccgccgatccaatatgtgaatggcgagacacggtacatgaagatccagaacccgggaagagcatcggggggctgcatcacaccacagaaggtgagagacatcgcgaagagaagaacgactactgcactggcggtggtttcatctgggagaccagcaatgaccatgtgggtgaaggtgctggcgtagatgaagaaaataatgcagaacaggaggacggttccctgggtcagcgaatcggggattccaacgacggcatagaagtaggagccataggtcaatatacccatgatgaccatgtagggcagctccacaaccatgttggcaatgaggaaagctttccaggagtaggatttgctgggacgttcacgtccctcgtagagcgatcgctggctgacgaagacgggcatgatctggtgagattagtgcatgttcactcgcttgattctagatttggcttacctgttgcgccaatgacgagaagattgtacaaatcatgaacagggagtagacgacagtctgcatgccttgcagcgatgttttggcaccatagaaagagaaaccaatgaatagaccagagacaattccaagcccccatttcgccagaatgtaggctggcatgcgccagtattgttggaacacgcggtatgtgacttcgttaatctggaaccagaacggcatggcgaattcagagtgattttgtgctgaatcatcagtggcggggggttcattttccttttctttgtgaattcgattgatctcattctggacctccgtgctttcgttgctctgcttccacacgtcgaaccagtccatgcccttgtcattctgaccagcgttgacaatgcccagcatatattcagctgggttctcgttatccgcacacttccgcgcaccgttggattcgaagtactcgagcattgtgctagagttatctccaaccggaccgaagtacacggtcttaccgcctcgggcgaggaacagtagctgatcgaattgttggaagagcatggcgctgggttgatggattgtgcaaagaactgcttggccgtgcgaagcaaggtcacgaaggaatgaacaaatagcccaagaactctgagagtcgagaccactgagcaatagttagcatcggtaaggaatgaatttgttgtatagggtacttgcctagtaggctcatccaaaaagagtagtagcttgggtttggcggccaattcaacaccgatagtcaacagcttgcgctgctcgacgtttagaccctcaccaggaacaccgacaatggcttcagcaaactcctccatcttcaacatgctgatcacatcttcgacataggcatacttctctttaaccgaaacggaggctggctgacgtaacattgcactgaatcgcagagactcacgcacagtagcagtatcgaggtgaagatcctgctgttggacataacctgtctttcgctggaaactctgatccagtggacgaccattgacaaacatatcaccagtaataacacccatcgatgtacggtgtgccaatacatcaagcaaagtcgtcttaccagcgccactgacacccataagtgctgtcagggttccaggtttaacccatccagaaacattgtctaaaagacgacgcggctcgcccttaatctcgatatcatagcacacattgcgccaagtgaaggtatctgtctgagcctggatagcacccattcctttttccccagtacccgcagcagcgtggtctttagttgtctcggtgctttcaacatcagatccagacttatggtcctggcgtaaactggcaggctcgtgaccgcgacggaagacgagagcttcggcggcacttgtagtagcagagttcagctcggtcgcgataaagtagatggccatgaaagcgatcaggaagcctatcaggataccaaagtttcgccagacgtgggcgtagctgtagttgtagttcagtgccatgaaccggtcaccgttgactgttgtggcgcctgccagcgaaccaggtgcagtgcaactgaatgcttctcctgataggtcggcataggagggaacgaagcttgagcaagggaactcgcgagcatggaactcgttggcaaccagaatctcgaaggcgtagaagatcggattgagataatgaatccaattgaaccatggatgcatagacggaatagggaggacaaaaccggtgtaaaccacgagaatcaaaatcatgacacctgcaagacccattgcctgtgaaatagtcttggtgacagcggccagtgtgcggaagattgcactcatgacgaacgtgatgatgaaagtgatgaggaaatagaggaagaagttggaaggttctcgttgcagaccagctagaaagtataggatgatgttgaacacgacagataagacaaacttgactgggatatcactaatcacaccagcaatagcttctgtgaagggatgataaaaggcaaaggaggcatgtttttcgacgattgggcgttgtgaataaagattgttgatttcggacattgcggtgagggcattgagcaggacggcgaagaatagagttgcacatttcgacgtaaagcccacagttgcattcggggtatcgtagaagacagatccaatgatcaaagccatgataatattagtgaccaccacagatatggtggaggcagcatcgttccagagtcgttggtaggcgcgaacggtgttgagtctgatttgcatataaacgctgatgatgtatggagacttgggtcgagtatgtttggcctggacgccacgcttccaattctgtaaatcagctagggcttgcacatcatctccaacaggattttgtccttcatattcagcaatttcatttagcaattgcttgtattcaggtgacttcagccatgcagcctcaaagtccgcaggagtacggggaacacgattttccatgccaggcttggctctccgctcctggggattcgagatcgaagtgaggaaatctccagtggtctgccgcgtcgggcaatcccagccctggttctcaaagtaagacttggctgcggacgcagctccgaagaatacttggtggccttcgtaaagtacaatcaccttgtcaaatacatcgtagatgctttgactggcttggtaagcagcgactgcttgacacgcgccagtgatatcagaggatagtcgcaaagcctcgacaaacttcaacgcggtggcggaatccaatcctcgagtggagttgtcccaggcagcgattggagcatgggctagggccatctctgcaatactgacacgctttcgctcaccaccggaaacaccacggatgaaatcgtttccgacgcgcgtgttgtatgtgtgactcaatccaaagacagccatgatgatctgggccatatatttggcaaattctgcgcgcgacatgccttggaaccgatgggcgggagttcgtgttgcagctgcaaactccaaagtctgaccgacggtcaagtgagggaagtgtctgtcaacctatagaattcaagattagcgatattctcattggcgtggtatgttgcgactgtacctcttggttgtatactagttcgcccttgaactctttcatcatgcgagtttgaggaattcctaatgactgttagctttaactaaaggatgcgggacctcaattcttaccattgtaatgaatgacactctccttgtccatcttcaaaccatgcagctctccagtcatggacttcagtagcgtactacagccggcacctggccgaccaagcacaagcagcatctcgccactttttaaaatgccattgaagtccttgaggattcgcctttgaggagagtgtgattcacgaatgatttggggcaaccgaaagggggcggtcagggtcgatgtaactgtatcttggaactgcagcgcagcgcccgatccgtatatgttgaggtttttgaaaacgacgtctgatgtgtgtcccgctgggccatcccggttgaggtctttgaaagccgcttttagccatttttgcaagtcgaactttccagattgggggtcgagagctggatcttgttcggcgagggcttctaggttatccgaggttccaggggccggttgccggtgtgaatgttcagtggctattctcgtgagggtgtcaacatcgttttggttgatgtatgtcatggactggactctcccgagagtcgatccggtatggggtggttgttcatccttttccctcagctcgaaggagtctttctcggacgtcatcgtgccgagatagaataaggaacgagcacagggaggcttaaagagaaattaattataatgagaaatcacacaaatgcgggcgcgatcagatatttaaagcctaggcactacgtttccgtttttggatgacatcttccattgtaatgagaactgtgggtcggagtcggaggtcggagcaattgaagacaatggaagagatataagtggagttgtgccctgttacgatattacgatcccaggacaatgattcggcacgggatacgaacagatcgacatcgaatcgggctcgccaagttgcgccaagtttgccgtaagggacctagtcgcgataactgcatccttaactgcccgctagaacctaaaggttttctaagcattctgctgagtcagcggcacttttttcgaccccgggacccggaacacggagataggcgatcccgagcctcggctcccgagcttatgcgaagccgtggacggtacgcgctgtacataaatccaattatgatttgccagacgcagtagagcttgcgagtgcatatctaaaatctttgcgccccacatttttttccagtatccctttattgattattattacagaccatacctatctaagactcggaggaaaattcggtcaaattgggcctgcatcggctcgggaacacatcggcacccattgatctttgaaccctgagacccgttaagccgggactaggcaccttacaacatatacactacgtatacgagcacggatgtggtactgtacaaagcacctggatgtggcgactcttgtgcgtttggtggcttcattgttggcttgcaagattgcttgtcgccactttttgatccgtacctggtggagcgcagattaccccagtatgcatatatgtaaggctcctctacggagtaaacaatgtactgttttcgatagactatattgatctcgccgtgacactatctatatgttgtagtgaatagtaccgaattaatgaagaatggcactcgggggacccgtggactaaccatgtctcgcggaatcatgatgcgattatgcatacaacgtacgatcacatgctatcacatgctacaggttgtcttttgctgtttgcgcggtttgacaaagtggggctgggcttgctcgtgcctcccggaggttccagggttaccgttatctccgttatctccccatactattttgaattgaccgcactcttcagtattcaaagaactggcttataacaattaatataaaagtcaagcgatcaattcgaaaagccagctccatagcaagagctaagtgcaggatctaattgcaaggcttacctcgccggaatcaacaacacggctggaaagtcgtggataaaggggttatttacatctacatggttggtaaaccaaaaggagcaaataatggatttaaaatagtgttcattgttcatgcaaaatcattacttccccgtcgcctccgcgggtattgaactcgagtgagaacgcaagctgaaagcagaccacagccagtgagaaaccaattaccgaagatcttgttgggattcgggatcgatgtctccagaaaagatggagttgacagatggcttgtaggcgtggagatagttggagttgcaagccaagacgtcttaacaatatccgaagcaagcgtcgatatcgtgattcgagaggctgtgtatcggggagtaaatgtctgacctggagtctaaactgcttggtgtgactctattggtcgcttgatgccattgaggtcgaccatggtggcaaggcatgtgccagtgatggttctgcaaaaaggcttggctccagtagagcgactgaaagaagacaatatgaggatgaggatggggataaaggatggggatggggatggaggtggaggtgggaatataatgaatttgtccgtgacagctgaagaaagccgttgtcgtccgagtcgctttgcgaagccacgcccggttgttggtttgccccgaggcaacttacggtgagtagcatttaaactaccggccggagtgctttcaccataagcttgtcgactgagtcgctttgcgaggccacgcccagttgctggagacttgcagtgggtagcatttaaactaccggccggagtgcttccactgcaagtctgtcgaccagaacggttcctggctgctgggttgttgtgaggcgacgaggggagggggatagggatgaggtggggtggggcatatggagtggggtttgggggagagggaggagatttgctagaaacgagttagcgagttcaaacatataagaccaaagaatgaatgcatattaccatgaacagttgtagtagaaggttgctggggccaagagggaagatcacgatggaaggttcttaggatgaaaggtcattgtcttgatgaaggttgttgtcttcgaagaaggatgttgtcatgatggaaagttgtcataatggaagtgtccaaggttgacatgttagatggtagtcaaggtcataatgagttgacatggtggatggttgacaaggccgtagtggaagattgtcaccatacagggttgtcaaggccataacatatggttgacatggttgaaggtggtatggcctgaggttgacatggttatagtggatggtatatgaaggccattgaaagtggaggtgccaaacccgagagatgcgaaggaggaaagaaagagaaagagaaattggggggaagagggggtatttatacccttccagtggcttaaggtcatgagaaactggggtgggtgacgatttttgaccagaagggaaggaactagggcaaacctgcaaaccatctggtcgcaccttccaatatttatccgacatgtgacagtcgaagctgcactcgcgctgtctatcagtggacgaatctacaaatcctaggccaattagcaaaaactactagtctatacatcagaggtatcaactttgcctatctatatacactccaagaccggcgtgactgttatggagtgagttattgaggctttgatattttagaccttgccatgaggcagtaaatcaatggagacagtatattatgtactcttcgccatatgtttcatgagcaatttctttttcaattcgcaagttacatatatagtcgaggcttcgaaggctactcggacagtgcttctattgccacatagtatacattattgtaatttgtttgtctgcagtacctaatatgtactatcaagagatatatgtagagaatacagacagattcagcactctaagccgttgctatattcataaaaagcgcgtataattgttttgggatgatttcggacacctggggatgctgagtgtaaataatgcagaatcttagctaagcaatcatatatccatccatggaacctagatcggtacctaaatcaagtgacaggccaaatggaaacaggattctaatcgagaccgatgtcagcggggcagatcggcgggctccgatgggaataaaacaaacttggaagccctcctcccctctttttctcttcatgagcccagaaatatcatctcaccatggcaatccaatcactacgtgaaatcaacgcttacaatctgcgcaccttcaagcaccactatgtctccgagatctcaggctcgctcggcgatctaggcacattcctgcctatcgcgcttgcgctagctgtcaacggcactgtctccctcgccagtacattgatcttctccggaattttcaatattctaactggtctgttctttggtattccactgccagtccagccgatgaaggcaatcgccgcagtggctatcgcgcgcagtttctcaaatggcacgatcgctgcagcggggatcttcgtcggcggctgtatccttgtcttcagcttgacgggtatcttgcactggttcgccagtgtgattcctattccggttatcaaaggtatccaagtcggggcgggattatccttgatcatcgcagcctgcagcagcatgctgcacccattgggctggaccagcccctcctgggccgataaccgtatctgggcaatcgctgcatttgttgcgcttctgctcaccaatgtttatcgccgagtaccctatgcaattgccgtgttggtgctaggtctggtgtttgccattattcggactacagtcgctggacatatgcccgctttcgaagtgtggcatcctttcgctctggttccgaccccacatcaatggcgcgtcggtgctgtggacgctggtattggtcaaattcctcttaccaccctgaattctattgtggcggttgttcacttggcgagtgatctactgccggatgtccgcactccgtccatcaccaacgtcgggttgagcgtagccggcatgaacttgattggctgctggttcggtgctatgcccgtctgtcatggttccggtggtcttgccgcgcagtatcggttcggagctcgctcgggagcaagtgtgattttcctcggcctgttgaaacttatgattggccttcttttcggagagaccttggttgacctcctgaagcgatttcccgctgccttccttggtgtaatggtcattgcagccggtacagagctgcttggcgtcggcgagagcctcaacaccacgggtgctcgggacctcaaccagaccggtggtggccttgtgtcgaacattgaacagcatattggtcccatgcttacagatgaagaacgcagtcgtcgctggactgtcatgatggtcactgtgggattactggtaggattcaaaaatgatgcgattggcttcattgctggtatgctttgccactggtcctacgacatcccgaaatggtgggagcaggcgcgtagccgctggtcggagggacgtctacgtctacgtgactagaaataggtgtggaatttcggggtttgaaatctcatgatattcttcacaatatatacgtaaagaattcacagatatgcattttgatcttttttatatatagcaaaaacaagcgcaattactcaccataagcaaatgcaggtcttcaccaacacactcaccaacacactcaccaatacactcaccaatacactcacctatagtacatccctaacatccacatcacttcctctctgtagcctggtacctgtactaggattctcataagggcggtcctccctcgccgcagacgaaaagccatccgaagcaaaattcacatcccgtccaaaccggcgaccctccctatggcgccgagtaacgccccctatatcatactcggagtcattataattgcccgtcacggggtcataaaccctagaccccaatggcgaagaaaccaaactaaacgaatcgtcctcgccgtccccatccaagagctgagccgccgcacccctaatatcagccatgacattgggcgcggaatctggggtcggggtatctttggaatctgaaacgtcatcctctagttccgtgatgcgccgtattcctcctgcagagctaccgccaggctcgggtaaagctagctgttcctggcctgtattgtcgtatcgtcgttcttcgacgacggccggttggcctagatcttgctgggctgtacgcacgactgttgagccgtcgggttcggtgtatgaagttgtcgaatacctgtgtccggttgtagtcctgccgtcggtgccgttggttgtggaactgtagtagtacgtggagcttatgaaggagtcggacatcgtagcggtgatatgtggaaaagtaaaagattgatctggtccacttgggatgatttgcggtttttgagttttgtttagttgggtaaatggagaatatagaatactaaacctttggggaggttgttttatttctttgcttgtagaagcgtctccgtaagatgtcgatatatgcaatgtacaagttgtactggttgctttcgaagttcaaaatgttgaatatcgatgcgtttatatatttcatcttcccctgtcctgtggcaagctttacttgccgcttgcatcattgcctcgtgcggcaaccaacctctatggaagaggcaaagacccatccgcgtcgccgaggggtctggaggtaccccacgagaatagagccggggaaacaaagcatatattgaacgtctaggcgttgtccatagatgcgcgtgcatggatgaggtcccagataaggtactgggcgtatcaaaacggcttatcatctcccccgcttttcaacatcgaaaccaactcatctccaactctggaacaaaaagcacttcatggctggacttaccgaaactcaggtcgcctccttcaaggagaacgggtacctcgtcctccccaactacctcgccccaaccgaagtcaccgctctcctcgccgagacaaacaaactccttgaggaattcccactagaatcccaccccctcacccagttcacaacgggcgacgaaaccgccgaccatgtcggcgacgactacttcctaaactcgggcgacaaaatccgcttctttttcgagcccgacgcgttcagcaccgagccggatccagtgaccggtcgcgccgcgctcctgaagcccaaaaaccgcgccgtcaacaagatcggtcactcgctgcataccctatcgcctcctttcaaggccatctcgctcaacgagcggaacgctgctgtcgcgcggtccctgggattcgtcgatccacgcgtgctgcagagtatggttatctgcaagcagccctcgattggtggggccgtgccatcccatcgcgattcggagtttttgtatacggatccaccctctgctgtgggttggtggtatgcgctgcaggatgcgggaccggcgaatgggacgttgggtatgtacaaggggtcgcatacgggaaggaagggtggtcatattgctaggaggtttgtgaggagggagaatggggcggggacggagtttattgagaatcgggggcctgcgctccccaaaggcatggaggaggagaagagtgaggaggctacagatgaggatttggagattcttgatatcaaggctggatcgcttgtgctcattcatgggaatgttttgcataagagtgagaagaataccagcctcaatagtcggtatgcttataccttccatgttattgagggtgccgatgggtgggagtatgatgtgcgaaattggttgcagccgcctgctggtgggttctcaaagttgaatgcttgatacacagttagaatacgaatgaatgatgttacggtcaataatggtaaatagttcgacttttattctttatgcaaatcctgtacaaaagatggcccgccatatacaccagtgtgcgaatcccagacaccccgaactccaagttgcgattcaaggctgtcagatcaggtcgccttcaacatgtcaagcattccctttgtttgccacgcttgttgggccatctccacttcgtcacgcacccggcggtgcagacgctccaccatcttgtcgacctgtaccgactggcccaggtttccggagtagatatcgagaaggttcatggcgacctcgacgctaagatcgaccaggcggggttcacggatgttcttgtaaacccactgcagcacaggctggagggtgacttcatcgcggtccttcagcgaggcacggagggcggagcggtggcgcagggccgtaagcagtgtgagttgcgaagtcttgtcagccgagctgaggacctggtccaacgcaacagagtagcgtgccttacggagatcgttctcccaaggctgttctctcttacgcttcttgcggtcctggccctcaatgacaatctccacaccttctccgatgaaatcgcgtccacgtagacgcttttcccatccagagccacgggtcttcttcttcttagcgacttcccggtcgtgctcctccaatttgccctccagcagagctgccatttccttccggcgttctcgctccttgatcttctgttggccagatagtcgggtcttgatagacagaagacctgactgcataccaacagcaatgtgcttatcctcgtattctgttccggaagtgatcgcgcggagagagagaatgggtgatgggtatttggatccggagacggggttccacccagtggtctcaaagaccttcatgtgtccatcgagggcaccactgagcaatcgctcaccattagaggccagcgcaagggcagtgacagtcttttgatggctctggatcatgtgcagcggcttaccagccacaatatccagcaccgcaatcttgttatcggccgcagccaaaactgtagttccggcgggcataggcagaatagtctcaatcggcgcacccatcttgaacgtcatagcggcacggtttccaactcgaggatcccacagtcgaacagtccgatcgtaagaacctgaaaccaccagaccagaagaagccatagagccaggcatgaatgcaccgctgcgcacgtaatcggtgtggccgacaaaggtgcgcgcactggtttgcgacggcaagtcccacaaccgcactgtacggtcatcactggctgtgaggaccgctgtagggtcgctaggagagaacttggtcacccacacaggcagcttgtgatccttccacgtcttgaggatggcgcgcgatttgacatcgaaaacttgcacggaaccggtgtcgtcacctgcaaccaagacacgtccatcgggacgaacgtcagtaccgcgcacggtgtcgtcaaaccgtgtaagtgtccgcaggagtttccgtgtgcgaattgaatagatctggactcgtgcgcctgttgtcacagtaaagacatcgggcggttgtgtgagagaggggaatgccgcagcagaggaaggaacggagggctgagtgatgagattgaccggtccattggccggtgacgggatcaggagcgggtttttgaatgttcgccagtattgttgctcgggcgttagctgcgtcgagggtaacgaggcgagcttgacctgctgcagaggcaggacgggcgccgccatggttgcagtggtggatagacagtagttatttggggggtgttaatcaggtgggcaacccgaaataagcaacaggcgataatgttaagccgactagagtgctatcatgaagttcatgaagaccatcttttttctgccgatcaaaaaagttcgtctcgcccaatcgggaatggtggcggtagcattctctgcctgaggcataatgttctgaatttttgcctgaggccacacggcagaacatcaactcttggcattcttggcattggctttgactttacatcaatcaaagaaatggctgacacagccagagcctagactggacccctcgtaagatgagtctgagggaaaataaaaaatgaaatgtaaaaaatacctcggctgatactttttcgcccgagccattggaagttctctgcctctgatttcaatgaggctggctacaagcaccattcctcggctgacctgccaggctacataatatattccattctcgggtaatacatcatgtaccgagtacgaagtattaatgcttttacatatgtatcacattcatcagattgatcagtctaaagagattcccctcagtaagcccaactttttttcatcacttgacctaaagataagctaaaaactagtggatggatacatatgcatacaaagtacattgtacagcataggcttccgcaatttaaccatccgcaatgttaataatagtaaccttggtgggtattgattgcccaacaagcccacttgaggcaccggcacaggcaacatcattaatcataaagcgtctagaacccgtagaggatgagcaagcgaggcaagacagtctcaccaatattgccaatgtatgaaaggcatctcgaatctcactaggactgtgagtggccactagtcaggtcaatctccagtgggggggaaacggagatccatcggggtgcagctgcctaaccctaaaggtggggaggggagccgcgacacttcacagcttattgaagcccaaatgccgctggaaccggcactttttttttccacaggcaagaggaccgagaatactcggtacgaggcactgtagatgaatagcgatagtgtctgggccatccaatgatcggcgatatacaatataaatctctgaacccgcggtggctgggaatccgatgaggccgcgggatcagatcgcgctgagggatccactacatgcgggaatacctgaccggggttggccaactgaagatgagttgaatgacatcatgagatatatcgcagcatacacgaggattaatatacaagataggattgagaatggcacgaggtgcaaatagagagcgacttacctaacccagtggcttcctaactcggtagcggtggtcgtagcttcccagttccattgtttactcgcatgcaaggtttgtgtatccatggtatggatgaatcgccccgtccagacaccgccaggggtagggaccaatcatatctgaggatctgttacaacccccccagccacctccaatccccgtataggacattctaagagtatgttttctctttcctccttccccctctccacactgtagacattgactctatggtcttttctgctcatattcaatacatccagtgattagcaactggtcacgaaatgtcgaagatctccaaggtcaaccatgcagcaggcatcttcgccgacatatccgtcgatggccccattattggcacattggtcgctatcgttgaccgagcgaagaacctacccaaccggaagactatgggcaagcagaatccctatgctgcagcacgactaggcaaggaggcaaagaagacacaaacagacttgcgaggtggacaaactcctcgatggtaagcattgagcctgatagatgtacaaatggaagataagcttacctgcctagggactcggaactccgatttaccgtacacgaatcacccgactacttcaaattgaaggtctccgtgttcaatgacgataagaagaccgacctgatcggtgaaacctgggtggatttacaaagcttgatcattccgggtggaagccaaaatgatcactggcacccacttcaataccgtgggaaatatgccggggatatccggattgaaatgacctactacgacacgagacaacaagatgaggttctcattggacgccgacaagaagccgccgaccgggtccaaggcaaggtccctagtactccaggcagcacgggcttgtctggcccccgccaattgaaagatgtcaaacgacgacccttgcccagtggtccttcaggggcctcggcgagacaacctgtggaacaagctcactctccacttccacttcaacaaccggtcccatcgagacccgccatccctgagcattcaaacattgcatctagtgctccggaaagcacatatgccccgagatattcagagcctgcttacgatgcatcaacatatcacgccccttctcctgtgccgcctccctcccggggtgggtatgagagcgatagccacactcaaggatgggacactgcatctgttgctcctctccgccgaaaaatcacccatgaactgccttacgcttcaaatgaagttatggaaaatacatatgatccgcgtttgctacagcagcagcagcaggaacaggaacagcagcaatttcaactgcatcaacaacagctgcatcaacaacaacaacaacaacaactgcatcaacaacaactgcaacagcagcagcagcagcaacaacaacaacaacaacaacaacagcaacagcaactacggaatcgttccgaatatgatcggccaccttcgagagacaatcgcctcaccaggcaaagccagtacgaggcagatccctatgaggaagtttcatacctctcctctcaagactactctcaaatagagcaaccgcgatacaatccggaccctatgtcatatggcgcaacccatccacacgatgtgtcaggttcagagttcatgtcttcctttttagggtctgtggatgaaccgagataccatccaagatctcgccctctacaaatcacggctcatggtcatgattggcacccagagtatgctggaatgcaaccacgagtagaggatgaagatgataacggaccgccccctcctccaccggcacatcggtcacggaggcactctcaactgcccaccccgcaatcatcgccccactcgtatgcagcctacacaccccagtccacacctcgatcctcggctccccatctaccatcaagcatgcctaccccgtcccaccgcgatcactatcaggagccttctttaatggagaactctcccgcgatgcccgcaagcctcgttgcaggtcatgaagtggaagacccatctgagaaagcagcatttgagcgatcagtccgcagacgcagcacccaatgggacgatgagatgatgatctcccagtcgcctgtactagctcctgtatcagtccccgttcactacgatgctcctgtctacagtctgcgaacatcccccaaccctatcgagcaaaggcccacttctagcagaggtggatctgtcagctctgatatgcgggctgtgactcggaaatccgtcagtccgcggccctctacttcagacgtcggtggtggctcttcagtccctttctctcccgactcctacatctcgctaaacccgaatgcctctcacaatcccaaccgagatccttccccggcgtacaacacacctatgcaggctagagatgctgtgatacgtggaaagactgaaccccgtcgagacggagatcacccaattataggagatgatggtcgggagattgacccatccgaccatcttcccactgatacatgggcacccgaaccagaaaggaagaaccgcaagcctgaggtcatcatccgcttcaaaaactcgccccggccaacttctagaggcaatgacgctcccccaccacgcagcacaggccagccacgcgtagcattcaaaactgagaacaacacctatgcaccagatcgcccagtcaagttcacacccccccaggtgcacccaaatccagggtcaatggttcgagctccacctcggccggactacgcgcgtgaacgctctgacagctacgcgcgaagtcgggcctacagcgcgaccacttcggttggccggccgcgctcttctcgaggctctgtttctccaaacccagggtctcgtaagccactgtatgactacagcccaggtcccccaattccaagcaaagtgccaatcacaggaggagctccaagctatcccgtcatgtctggcaatacaaacggaaacgaccgcatggatgccctcagtctagagctgagtacgattgacattggctctgcagcttgcaaccctggccggggggctgttcgaaaatacgtcccaagacagccagcttcaatcggctacgctaggtaaaacgatttgctttttacatttatgcatgatttatgtactgctatttttctttggggtccttggtgtggttggtgtatctctcgggtccgtttcgattcttgttttcagactgcattgctctggcgttatggatctgatctacggggaaatggggcttgatcatgtacaccataacgggaataaccaagcttggaatgatatcgtaaagtgacatttaattcttactagatgagtgcttccgtagattagagagtatcttcaacaagatcattgatgtaatcagttgctcgatggtctgacagtagacctcagtgtgcctatataggtcttcttgatatcctgggttttccagtgattatattccctgctagctccagctgcctgtggttgtctgtttgcacatgcggtcgtatatggagacatcgtgctcaggtcatgccaacctgattacctttacaaccttctagaacatcatgatcatgtctctctatatataaataccgtcatactcaataaatcatcctagagactaggttgttccaattgctactagctacaaaccagcacacacgatgtaacgacagagctcttactgtagaagttggcagggtaagaacccaataaaggaaaaaaaagccatctgaactcgacccaagtcaaacgcagtaggtaagttcctgcaaagttataaagctcatcttattacagctcccctcttccccctctatcctattctcgcaccctgctttccttttcattttggctcaacaccaggacccttccacattatcagacagctttgctatcaaaaaccatctatcaaaaaccatcaggtagtgcgttcctcatcaagaacgtacttcccatcttccttcgtccttgtcttgtttggcatgtccacagccatgcaaggtcagggctctgacgtccatggccatcaaggccatctccctgaggagaacgtgaaaatgtacgtatagtaacatcccctcaatctactcggtatcatgagttgaaaaccctatccttcttgttgacgtgaacgtcttttgattttgtcttgggatcgttttgctaacctatagagctcagacctagcaacaatgtccacatcaaccaagatgctttgacgtgagtatacgctatatcccctggcgtcgttgtgtgcctagcagccaagcctatactatctggtatcaagcctttagcctcagtcttttgatagttctctgccttgctatcactttttcattatctacgaacagtgctacgtgatacaatcccatcttgggtgttggaagcatcgtgttctatgaagatttcagctaaacaaagtattagtcctgacagtcccaatcaaacaatccaccaggagaaccgagcgctgtcgctacttctctctcctccgcccagttcgcctttgatacctctgggcacaatcgattccgcacccacccaatacagcccagaatatccggctggtccccagttcaccagaatgaatggatcataccgtgtttataatccaattcggggagcggagctcaggactgcggccgatcttgccaacccattcagagacagactggatcaaggtggccagatgcgagaccatggaagggctcgcagtagaagcccttacagctcgattcaatccaacgggcttcttgaatcccaggatctaccagcagggccagcgaggggattcaatcactatcctcgggaggtgtatgttccgcctggcatcaatgacatgatgcatctgaatctgcctagctcttctccgacactgtttccggacaacacccatagtggtggtcgtgatcttgctttgagcctcccaggggactctctgggacagagttaccatctcaatgatggcaattggtatggatacccccaggagcaacagcaacaacaggtgcaagggcccgaaagaccaccagtcgccaagcaagaggaggaggacctcgacgacaactacgaggaccatttgtgcgaattcgctgcaccatgccgaatgcatccctcgcctgatggaatgcactaccgaaaggtagtatcgcatgtgttcggcagaaacaaggccgtcaccaagctgtttccactcggagtttgggtccactactgccggaagcactaccagcgcgcccggtatcgcgcagatcaatggcctttcacacagtgtgacctcctgcttgagtcactgacacgtatggaaagctgggatggagtggagagcttcgagctgatccttcgccggcgagagcaaatgcgtgtcgggcgtgaagctgagggcacaacgaccactgagacctccaagcagaaagaggtcacttcctccggcaaggcccaagatcagggcaccaagtcttcggctattgtcacccgcccgggccgtagacacccaactgccatcatcgcccctgtcccagactggcttcggcaacacgttggtcatggcaagacctttcaggaaatccgccagatcatcgaaatggtgcgcagccacatggtccggctgcgaaaccaagaacgagcgcaacagcagctcaacgacgttcccaagtccccaggcaaaccaggaagccttcgtcgaggtgcatcctcgagcatccgaaagggacgtaccgcgaagggccaaagcccccttcccctgcgtcctagcacggttcgattccccgacgttgaaatcctcccccatttcaagccctgggtgaaggaggctgctttgcggcagcgatctgccacaaacggcccaatgaacatgaacatgaacgagcccgagatcaaggacgagtcggagcagagaattctcggtggtggacgtgtccttggagaaatccaggataaccgggacaccaatggcgctggatccagccaggcatcaaacggcgactttgcagctacagcagcgcagcactgcgagggccgcctcgagtctgttactgctgtttctgctgacgacaccgctggggtcaatctcttgcaggtgcagcctcacatcggtagggctgggaccaaccgtggccagtctgagagccagcgccgccgcagcgagcgggtctatatcaaggccctagatcgtctccctggccagagcttgaacaagaagaccatcaaggaggatgaggaggaggaagcggagaatgaaatgtagtcttccattggaatcggcaatctgggttgtgactcatgcggatcgctcatatctgagctcatgtatccgagttctattgatgtcagataaagaaaaaggatcaggttattggcggatgatgctccgccggaatgttgcagaagtcgagttggttggagtgctgaagggactttaagtatgctgcttgatcgcgcgtttcgcgggaatatcgcgggcgaatttgattctcaaaataatgaagcggcggtgatagaaatttgatgtaagagaagttgaaatctgaaggaaatgtgagagaatatatttccgtgcacagcaaacaatcaaatttgatcccattgcgttgatatccgatcaatgactgcctggtcatgtagttgtcttcattaattctacgatggcaaactccatatacaatatagggctatgcctgacagctgaaggcaatttcaacgacattcggaaattcgagatctcaaatcccatttcagcttcatcagagactaccgatatacatatggatgtacccataaacagtgaaaatctaattgaacgaatatttgaatgcgaggaaaaaaaacgagtaagaagaagatccaggacacatactccgtacaatatagacaaccgcaacaatacgacacgcttgctaaagacaccgaaatgcaaggaacaaaaagtccctatgcaaccacccaagtaatatgaatcaaaaaagagattaatgtaaggtaattatcatggtagtttttgtatggaaaaaaatgccaaattcaggtctctaaacagactggtctagcttgccacagccagctgggcgacgagatcagacgccacatcgaggaaggggtaaggactggtcacctccttctccttgttcttgaggcgtctgctgatgggatgccattcggtttcgccatgagcgcggatcacgttctggtagccatcgcatttgaagtcgaccatgtagttgttctcttcgagttggtagagctgtatgtcgaggaagacccagacaccgtaggtgatcttctggagtccgcttggtacattgactgaggaggccgcactagcgctctcggggacggaggactggggttctctgcttcggtcttccgttggggcagagattcccgagatgttgaaacggcggcgcagttcctcgaggtcactgcggctactgtaagcactggtggtgtctccaggagggttgatgccttctttcagcaggcgtgcacggataaaccatgggtccttgggaatgtagtagtcggatgggaggtcggggtatttgctctgcaagggtttgggcttatcaggggagggggtcgcatcgggaccaatattggtgcctagagaatataagaatcggctcaaaatgagtaatgggtggaaacatacctgattccacgggttgaatatcccacaatccaccctgggcagcaattgcccggtacagatacagcatggcctcatatggctggtttcgggaccgaataccaaactgccatttacggctccgtttgggctgtttttctaggggttgaccggttggcggctcgaatcgcaacttgtccaagtcgacgacactgcgtgagtggggcttcaatgcacgggctgtggcagcctgttcttcgggagacatgtcccgataggcagatccctgtccctctgggtcaagcttgatggcctcttggcgacgctgctcgagcatttggttgcgagctcttttatctcgatcacgttgttccatgagttggtcgtgaacgtacggcaagctagtagggaggattcggacgtggctaacgcggagttcgtcctcgtctgattgctgtggatcttccgaggccctacggcgcgatgcactagcggtcctgtccatggtgggggcggccggggtcccttgatgacgaggcgcaggagtccgatccgcagatgaaggcgcagctcctttctgggcattttgagctaacaaattatcatccgagggtgctatcgtcgttagcagaggtaggttagtttagtagatcaagacttacaattagtttgcatcatctcattctcaacaacgatggagaacgcatccttgatcgcgctgggttcagcttgtctcaatgcctcttcgatatcttctcggccatatcccatgcttcgttcgagcttggaaactgcaattcgatggattttgctttgaaccgatataggctttgctatgtcaagccttgcagaatcaaccttcttcgggtccacccccggggcgatgaattcctctcgtggtggttctaggtacttggggagattcttcttaaaccatgggtcttctctgatctcagggattgtaatgcggtggacggggtgaacttggagcattgcccggatcaaacgagctgccccggatgaaacatatccaggtatgtggaaggtgcccgctgcaatcttcttgaaaagggctggaatatagtcatcatcgaaaggcaagcggcccaccaacaacacatacagaatgacaccacaactccacacatcgacctcaggaccagcatagagctttccggagatgacctctggcgcagcgtagttcgggctaccgcagctggtcttcaggaagttgccatccgtcataatattactcaaaccgaaatccgcaatcttaacgttcttctggttgtcgatgagcaggttctcaggcttcaagtcacggtgtacaatcttgtgtcggtggcagtattccacagcacagatgatttgctggaagaatttccgggcttcatcgtcgccgcatcttcccttcctcacgagataatcgaacaactctcgctctgcgtactccagcaccatcacaatatcggtcttggtcgcaatcaccgtatacctaaatcattggtcagccaactgaaatcccaatttcagtgtggattgaaattgtacaatttgatgatgtgtggatgtcgtagcaattgcaagtactggatttctcgctccacgcgcccaaccatatctctggagagtagtttgcgtcgggagatgatcttcagagcaacttgacgtccagttggctggtggatagcaagcttcaccttgccaaaggaaccctcgcccaagacccgtatagtctggtactggtcgaggcgttgcatatctcgggtagtcgacggtgactgcaatgggtcctcgatcttgctggtcggcctcgagggcgcgggcattgccatggcggaggggttggaggcgggaggtctcgcacgttcacgcggacgatcacggtcggaggggaggggaatagcgaggtcttcctcgtcgaatgcagcggccatggtcgggaataatgccaacgtgacgtgattgattttccagacggttcagcggtcgggactgctgactgtgcagaccgttcagtgcccgggagggttttctctctattttttctctccaaacatttgccaggcgccaatcagttgatcagtctcgaccctccccacaatagaaccgaatgtggagctgggcagctgtttgtcgggtgggggatggaggggtaaatttgcttgtcaggggttgaagaagtgaagaaaccaaaatggactgaagttttggatgaggttgagtgattaagccaatataaataggaagatcaatgagatctggggagccacctgggcatgattttcaatcaacctcgtttgtggacattgatggagttctagaccttacctaagctagttctggggcacatcatctattgtccactgtgatatctacatttacaggacatgttagcaaggaaccctgttatgacggaaaaatagtagtatatagtaagagactacttttcaattactactccgtatcatacttctgaatattcaccttgacctatgttatatatcagccaagctttgtcggtcaacacagcagctcctctttatatcttatgccagccctaatgcaatgcatatgatcctagctcgaaggttggtctgtgtctccgcagactaacaactaaatagaactagttaacaaatacaacataaagcttctttgtctttcttattttttttaaagagatttcgccgaagcgatccgagaaaatctgtgtcataggcagtgggtcaataatacccttaaagaactgtggctgaaagtcaattgatcgagattgttcattatttacacatttccagggtagaatagtgcatttcccctaagcacttggatcttaagttgactatatatgcgggttcgtggatatgtataacgtgccggctatattatccagtacgctaaaggtacaaatgcagccgggctatgcaacacagccactgaatcttaggcaattcagacaagagatataacctcatcgcatctaagagagtggagacaaataatgtacattatgtattgaatatccatctatccatctatccgtcgaaattatattataacgagacccagccttggaagagaaatggaattttcttcccgtaaaagagacttggatggtacctgggccttctagtaaattgtatggatgaggaagtaccccgggagtacgtgcattgagtcatattgcggcttagagcgatcaagcggggtgtcggggtcccaaattggattagcgtcgagtcggggacctcgaaagggaatggcggactgggagatcggagcatacatagaatcaaccgctaccttagctcttaggttccttcaccttccccggaagccatacagagttaccgttcctttcgtcttctttacgatatcctcgatatcttagtgtcctactgcctcaggatccttagacgtggcctgactaacacggcactctctctttgacttttcccttttcatacaaaatagatacccttggtgatacccactctacgttttcttttccaatggctttcgttgcggatcaattcttctctgagatggatgcgacaatctccaatgaatgggttgacttcgatcaattcctcgatctcccttcagcctacgatgaccagtcaaccgctactaccgtctcacctcaagacctagctctgccctatgaggcagatgggattttcacccccccatctgatttcatgcaatcctccttcgacatgaccaactgtggtttcccacaagaagagttcatgggaatggatggaggtttcatgcaggacccggctgttcctttgttcgatgatgcttcgttcttggcgtacaacccatacgacagcagcaacacattccggaacctggtggaggcacaggctgccgctgacccgcgtgttggttctatcaaggagaagcgccgcgaggcagggattgcactacacttgcagcgcctttgtgatgacactgctcttgacttggatatgtcctctgactctaacaccagcttctcatccccaagctggtcagaatacgttcgcgggagcatctctccgcgccctagcccggagaccacatcggtctccgaggcaccccctccaggaggcatggagatgattctcgacttgaacatgaacgccgcagccaatgtgcctaggaaacagaaacctcgctctcaggcacagaaggagaactacatcaaggctcggaagtacggtgcttgtgagaagcataaaaagcagcataagcgagtacgttttccattcacattaaccatttgatcaccctaacgttcgagtagtgcaactgcctggagaaggctgctgctcgtgccagcgatgttccgatgaatgccgcactccaaccacggccgaggcaaacgacgccccaagtcccgacctcagagtcacggtactcggactcgccgggtcaccactcattcaacccagctcaagcgcttcccaccattaaggcgatcaggaaaccaacaggctgcacatatggggtcgatccatctatgggactacctgtcgcagtacccaccaccaagcagaatatcaggacgaagactcaaaagagtacgccgcctggacacgatattgttctgctatctggcaagctcaattcaaattccaattgcacgttgaatcaagacaacgttctatcatcgagccgaaacgccgcgaagggtcattgtgccggacacgacatactcctatctggcaagaacatcccaaacaactcatgcgctggacacgagcgactcgtcacccaagagaagatctccaagagcacagcaagtggacagccccacaatacatgcagttcaaattcacctcggccggcccacgcagctggggtgtcatctggcagttccagcttgcgctggtgcgtttcgacctcgccggttggtgttgcatggtccgagaggactgtcaagacgtcctcggcgaaccattcaactgcttgcgacggtcgcactccaggcttggatgtacaacgaacaaggtccactcccacgatggcaagatccatggtgccaggtactgttgctggcagccttggaatgcgccattccactttgctacgcaactccggaacccagctacctggatcggatcacagggcctcagaaggacttgcctggcaaatctcaaaaatgtctggtctcctaccggtgccaaacgatctaccggtctcgccgtctcggcgtggatcatcaggtctttctggaactggacggccactcatcagcggagacagtcttcgtgttcgatccgctgctgaaaggactcgccgcctgcttaccagtactgccttggcattttctggtgcctggcaatcatcactgtctttggcatctggggttgaaggcgtggtttacaaagctttgtctctatttgcccgacatgttgtgtctgcgaagaagggcttatatctcggcggactgcggaacgctttcgtatagctgttctgctgttcttcgatgaacgtcactggaaggaacatcttccgataattggctggcgttgaacgatactgaattgtaaagggcatgggtgatatctattgtcacgttcgagttagctgtccctaatgatgaaatcaagcgaaattcatttgcattatttaatctccagcaaaccctgtatgttcgcagtaataatctaggagccccaggtacaattagttatatgtggtttcaaaagcaacaaccaaatatatcgcttccttcttagagctcccattgaatcggtaccaatatttatacgcaatcaaaagtagttcaaaatattgcatgtctgatgattatacggagcactatcgaggttattttcagaaatgatagacatcctttgccgtccccaccaattgagcctaatcccgcgccagtcctttttctcttgttcctgacggttcaaatcaacacgcatactttcgcttcgacttcaaaaccatgcactccccgcccctgttccgcttcactacagtgacggggtattttctccaggatgaccccgctacggaccccgacaccttcgactacgtaagagacccaaataattctgtcaaaaccattgtctgatgatctgaaaaggtgaactcaaacttcggcctcatcgaaaaacaatacgacgagcatctcggagtagaacagaccgacagccagtggcagcgtttcgacgcccacattaaacgacagaacgccagcaagagcaaaaagctcaaagttctcttcctcggacgccacggcgagggcgtccacaatgtcgccgagcgcaaatacggcagcaagaagtggaatgtaagtagccgagtatttcctccacgaatcaaccagacggcaaccagcactctaggaatactggtctctgcaagacggagacgaggacggcagctgggtcgatgctcgtctaaccgagcagggaagatgccaggcaaaagtcgcacacgcagcctgggagcagcagatcaagaccggcatcccgtcaccggaatcctactacgtgagccccctgaaccggtgtcttgaaaccgcgcagattacgtttcagggacttgcgatccctggcacggatccttttaagccgactatcaaagaggtgtgtctgtttgatccctactacggagcgtacaatctaacgagactagctactccgtgaaacgatgggtcagcacacttgtgaccgtcgctcgacggcttcggaaattgcagacgagtacccggagtatagatttgaagcggggttctctgaggaagataagttgtgggatcgtgaggtccgcgagtcggatgagcatcgcactgagcgactgcgtggtcttttgaacgatatctttgctcatgatgagagtacctatatttcgttgacggctcattcgggtgccatcaccagcattctggaggttttggggcatcgtcgctttgcattggcgactggtgcggtgattcctgtgcttgttctggtggaaaggggggtaccatcgcagctggagtcgcaagagctcgcatgatcggaggattgcaactttataactgacatgggtgctggggttgataaatattagagcagagcagaacagccagtctcaatggtttggtatccaagaaattgattcagtattgtacatgagtcgcttctactcaagaaagatgagagcgacttctcacaaatgcaattgtcgcctccaatcggctaatgaaaaaccactgtccacgcgaaagatctagatataaaaaatacaaacgccaaagcatcgatcaccaactgtagtactggttctgcgcagaaatcttgcgatctggcagttgtgtccaaagctgagctctgcgctcccgctgggccttggcctcacggtcttcccattcgcggatgcgagtcttctcttccttcaacaggaccgagagacttgtagtagggggacgcatgcggttgatctgaccacgggcgcggtgatccatctcatatccgtaaggaccacggttgacccaggcctcttggatgtagatatcagaggggttggcaatcttctgccgctcgccggtcttcagtatgacagtaatgggtttcgttggttcggagccagaagccccaaggcccataccggcacggacaatggcgacattctttgcgtgttccagatgttccaacacgtccttggcggcctttttgttgctgaagcgcatctggaggatggcttcgtcgatattctttccagcgatttggcgggcgagaggacccagcttcttcagcgaggtcttgatccagtgagatctggagagcgattcgcgctctgtgcgcttaatttgcacctttgtcggtacacggcctcgtttccggatctcgcggacagccatcttcctatcccatcgcagctgggcccgggggtcgggagccaatcccacttgcaggcgacttaagtcgcgatcctccaactttccggagataccttctttttgttcccccgttgccctggatggcatgggaccggatgctggtgcggcaaggtcggagccgaagatggaggttgctaaagtaccttcttccttcttaggggccgaaggtcggtgggtgactttgggtttttggctggatccgcccgtgaacaagttcttcaaggaagaaaacaaaccggtcggttttttgctttcgctatctttcacggcgtaacggatggctgtcgtggtcaatgttcggcgagggacgaaggagacggtccggacagctaaaggtggtaagtcagtaggggaggtcaaggatccgatatatcaacacaacatacctgtccggaccaattgccctgagcgatagaccattgtggctgttgggatgttgttgtcagaagttcacgtcgggaaaaaaggtgaaagttccctgcacttgtggtctgtgcgggacaccggagcctgaggcaccttaaattgatcgatcttctgagaatagcttcaagatatgcgacttgtgaccacaccagtcgatagaacaagaacaggcttatctacagctggagatgatgtcgtatatttgaggatcaaattcgaacctcattctcgcgacattactgtttcgtcttcccagccatctccacagtatccactaggcctcatctttccctcttccagttcttctctctctcttttcatcttccttcatccctcccttcacttttcaggccatcagcctgttgtttatatccctttcgaatatctgatattcttgagatttcagcttgccctctcggttcaaggactctcgttccctccaggcattcatttagattcttagccacccaccagaagcagctgcgcaagagtaaatctacgtcatttgccggaacaacaacgaaagacgatctggacacgaccggccgatgcaggaatggacgtgttgaggtacactaagaccgtcgtatgatctggatctccgctcgaaaagtacctgggatccattacgacaattcccagtatcccatcgcttctcccaaagctctatccaaatatggacatcagttcgcttctttcgccggactcgaatccaaagtctggaaattcgacgcccgtgcctggtcctacgtcgaacaacgcaccggccacctctgcagggccatccccccacaaagctatcgagagaacccggacaggctcgagacgcaagggcaagatctcttcgcctctcgcacagcacgtatatgttcctagtggagaatcttcgccaggactgagcggaggaaatgggacttctccgactgaagtacattcgagacaaccatccacgccgggaatggataccttagcggatctcgcctcgatgcagcaccaccagccacaacgtccaacaccgaccagcatgctccggagtactgaatcctatgagcatcagttatctccatctactattcacccccacgtcaactctatcaaccacaacacccccacctctcggatgtcgttcgagctcgccatgtcggatgggcgcgacgggcccgcgaagcggacctacgccgcgacttcgcttgatccagatgcgcaacgtttggcgaccgaactttttcatcaaatatcgctcaacccccacacgcatgacgcgcacgtgcaatttatcggcttgctgcatgcaggattcgttaaccacgtctaccctccgaataacccagatgtccacggtgacccgcgacgctatgatctactcaacgatttgaaaacagcacgcgaggaaatggacaagctgttcgcgatgggagaagatctttgggccgaatggattcaggatgagagtatgttagcccaagatgtcgacggtcgcattgctgttctagaactctgccagcgatccgtggtagaggagtttggcagcacaaaattgtggaatatctacggcgagtgggtactttatctctacaattccgctcatggcaaaaccagttcccagtggaccgaagaggatcgcatgattgggcgcgaggtgttcacatgggattcggtcgtggaggtgtggcagcgaggtgcagacgctaccaaatggagaatcaacaacagccacttggtctgggatcgccttttagatctttatgctcaggacatcgctcgcgaaccttctcaagagaagatcaaccatcttcatggactgtacagtcatcgtctgcaaactccccacgccacctgggaacagaccttccaaaagttttcaagcttcatttccgcttattgcaacagcaagtatgaggagattatgtgtgaaactgttgctcgcgcagcggaagcaaaggctctcttcaacgcacgggaggaattcgaactgcgcctggtcaaagcgcaagagtctggcgatcgtagtcttgaatgggctgtttactccgagtacattcactgggaattgacgcgcaaccgccggaaacgaggagaattcaacttcgaattggtgaacgccatttatcagcgcgctgttcttcacttccccaccgatgtttcgatttgggaagactatgtcatgtttttaatcggcgaatctattcatcgccacgcttctaccacgacaatctctaccctagaccgtgccacgcgtcattgtccatggtctggaaacctgtggtcccagtacctgctaagctcggaaagagaaaatcagtcgttcaacaagatttcgagtatcaaacacaaggcgaccagcactggactacttgatgctggtggtttggaggaagtcttgaaggtccacgtcacctggtgcagttaccttcgccgacgcgcctttttgtccgactcgaccgacgaagatcttgatgttgcagaagttggcattcgctcggcaatcgaaagcgtgcaagaactgggcgaaaagaagtacggcccggcgtaccagggcgatcctcttttccgtctggagcgaatctatatccgtttcctcagcgaaagcggcagttgggacagcgcgcgagagactttcaagggcttagttgctcgccgtggcaatagctatgaattctggctcgcctactacgaatgggaattgatttgctggagcaaatttgtgcaaggcgaggcaactgtcgacgcagcgcgtcgaacccccaacccgagctttgctactgctgtgctcaaacaagcgatcaaaagaacagatctagactggcctgacaagattgttcagacatatgttacacattgtgaggactatgaggactcagatgaactccagctagctgtgattgagactcggaaagcgatgcgagctgtcactgcccgaagagagagggaagcgctagaggcagccgcagcacagcagcagcagcagcaacaacagcaacagcagtgggaggccgcagtgcaggcagtcccttcacctgaaaagcgaaaacgcgaagatgagaaggacgggatgccgcaaactaaaaaggtccgcaaccaagaggcactggcggaggcccctgctcctcctccacgggatcgagagaatgcgactgttatcgtctcgaacttgcctaaaggtaccactgagaatagcgttcgtctatttttccgtcatgtaagtgccttatccaattactatcgggagaatttagctgaccaaacagatcggtaccatcaataccgtcaaaatgctccgtagagacgagaaaagctccgaggttgcgatcatcgagttcgagaccaaagaagacgctcttgctgccatcactcgtgaccaaaagcgcttcaacgacactgataacagcatcgacgttcaaattgggtcagagacgacactttggatcaccaattacccaccggatgcgggtgaggactacttccgcaatcttttcggcaaggtaagtgcttcaccctagcctttgtggcaaagctgacttgagcagtatggcgaagtacttgaaattcgaatgccgtctctcaagtttgacacttctagacgcttctgctacttgcagatggatacctcgagtgctgcccaccatgcgacagagcttcatggaatgcggttcgaaaatggtacgcggcttagtgtcaaaatatccgatcccggacaaagaacagcccgcagtggccccagatacgaaggacgagatatttatgttgcaaacattgcctgggatgctaatgaaaaagatctgaaagaactattttctaagttcggtgaaatcgaaagggtgttgcttgagcgaaagacgaatggtgccagtaaaggttttggctttgttactttctctaccaaggacgctgccaatgatgccgtcgcaatgaatgaacatgtgttcaagtcacgtcctcttcgtgttgaaattgctaccacggacagccggcgtggtaaccaactcgtcatctctcgagttgcatcacacccggcagatcacggtgcccgtggtcttgaagtgccagttggtgatcatgcacagcgcacacttgctctgatgaatgtccccgataccgtcaatcaagcccgcatccgtacccttgtcgaaccatatggccgtttaatcgcgatcaatttgcgcccagaacatcaaggtgctattgtggaatatgtcgatattcaggacgctggcaaagctgcgttggcgctcgaagggaaggagatcattgctggacgccctctccatatcggcacggttcgagagatgttgaatttgcaaccggaagtcaaaacagaccgagggcaatccgccaagcccgaacgtataatgaagaagacgaacctacaacttactgcgccgattagacgcccgcagcagcctggcgctcggaagggtggtggtcttgggatgaaacgacagatcgtaagttccggtcagaaacaatctgctgccactccggccagcgacaaaaaggacgcgacgcccgacggcgagagcaaaccaaaaaagagcaacgatgatttccgcgctatgctcgcacgaaagggtccggaatgaagtgcaagtgcaatgatagcgacaactatggcgcaatatttttttcggcattattcattcggctggcgtttgtctgttttccggtggtcatcttgctgcttcctttagatccgtatgtattcactcgggtcggtcttttccgtcatgatttcttctttgtttgtggcacatgccgtcgtgtatattatgactgtattgctcttagttctaatgatgatgtctgttccgaggggctgtctccgagacattgccccggtgacttgaaagaactggtgatctatatactgtagtatatcggtgattcttcgattctttaaacttgactgtatgaagaatccatgtctcatttaccatattttatacattatcgctgcagaatggaggtgtctgattggactatatgtcacgatcatgcaaaacacattgacgtcaaccggcttcacttggtcaacttcttgattctctgcggggaaatacaaaacaccttctgatccattctaatgggttgcacagagatttattgaaacaatataccccttttcatctatatacatctcctcgaatcgctaaactcctaaagtctcgcgtgatcctgattcttatcggaccgattagcccctctcatacggaataccatccctacctttacccgcatcgtctctatttcctgtgtcttgcttgggtttaggcctattgacacttgtcataatatcgctgctctacattcaatgtgcagagctatcaccaagcaccgtgaatattccacgtcatcgcatacctacagcaatggacttccacctagtacctcgcggtaccgatcggaactacacaggatttttcacaaagacaatagtctacatcgggacgctgatgatatttctagcctgtaggcaaactttagcgactagccagacactcaaacttactaacaaaatctcccagcatttggcttgacagtatcctcgatcgtcattccaaaatgggtcagctaccatagtgaaaaggtacgatgtttttgttcacccccgacaagctcctactaacaatatgaacctacagcccgatatcgaatactcctacggcctttcccgccgctgctcctcccttaccaatacctgcgagagcttcccacaacgcgacgactgccacggcgaagacaggtacttctgctctatgtggcgctcggtcgggttcttgatgtcctttgctgtcgttctgcagagcattagcttggtcacatacctggttatcctgtctggcgggaaacagctgcgcgagaatgggtggagttttcttagtttgatggttgctttgtctgctattgtgcaggcagccggaatgtcgatcgtggtgggttgataatatgtctatatctgggcccaagatgacttgtcctaatggtttggtttacaggcatatctattcgataacgaggaccggttcttcatcggctggaaacttgaccagtcctggatcctttgcactgttagctggtgcttaagtgttctctgcgcaggcgcggttattgtgtctggtaaggtcttgccctcagagggcggatacgagttgattcctgatcacgatgagcttcgagtcacttgatagtgcccaatgtagcattcatggctcctggatgaatcacgcgttacgcaacagacgaaggatacctatctaggtatcattcgtctttgacgacttcttataattctgctatttcggtggttgcagattgacgttttctatcttttgatttcgtgcttcggcgttggggctgtatacgtcttttatgcttttgaaatataacaacacaactaatatggataatgatttgaataatatatctctctatggcaagataggtttatcatttcatatctttgaagacatgtagaaaaatgcaatgcgacgtagaagcttcatcattcatctcatacagtacatttcctcattctcaatctaccagacaatttctttcccattcagcccctcaatagccggaatcagtggccgcagcgcttgaccatagtcacccccgttcggcgtgcgaagcagagtgtgaatgtggaatttcttcggctcctcattattcaaaaacacaccagagtgatgatcaaactcaacgaggatcaccggattctgaatacggtaatagaatggatcctcatcaccataccccccaatccaacaaaagtacgtctccgcttcatgcgcgcgcacctgattaatcttcatagcccgcgatttagccggcaggtaaagcagatattgctccagaatgccgtacacgagctgcttctgcgcagtactaaaactcgacacgagaataccctcatacggcacctcccggttgtcacggtacgcaccgcacagatggcgctggtcatccttattccagcgaccgggcggcatggctggatctttcatgtgggcaaagacacgagcggaagcctgcagctccgccgagagcgactgcatcagctgcaacccgagcttctcctcgatctgcaagatgcgcgtgccggcgtaagggccagcgtcgatctcgtttggctctgcgcctgtgaaccacggcgacgcgacgatctgccctttatacaagaagacgttcaggcagagatgatggccgtagaatgaccagccccaggggcgtgtgattgatgggcggccgaacaggacgaagttgtaggagaattcgttcatcactgctggcgacttgactagctcgccgaggaagtggttgatgcgcattgcgctgacggctttttcgtagccttctggtgagagcgttgtcttcaggacgttcatcactgcgtcccgggtctcgggggtgacttcgtcgagccgaatgcccttgtccgcgagtaggaactccgggttcgaccatgtgcgccattgcggcgagtcgatgtggtagttgatggcttctttttgcttatcatctagcaggctggttacggcttctgctgcgtctacaatttgttgaattgggacgtcttcttcttgtaatgtgaagagacccgggcggacgtttcctgtagatgttagaagcgttctggtatcgtttcagtttagctcataccatcggtggtcacgcctttgaagggctcttggaatagctctagccaatgcatatacagtgcatgtagccaaggtggctgatgtccggtcttaaattcgttcgcgtattcgtgcgcatcttgctggcacatcgcctggaagcgcgggatattgaggtcaggcaagtactggcggtactcgcctgtggtatttttcgatgcattggccatagttaagaatgctataaaaaaataaatcaagagagatgaagagatatcaaggtgttatagcaacccgagaccccacatcaggatgaccggtcttccccacgctcgtggggatgggaaattccttatccgctctggcaagatggggcttctggtctgaccaccggaaagatattatgtatttggagaaatgctatagacacactcttatggtatgcctatagtgttcttagcacgaccgcaccattaagtacccttccatacctatgaaaagaacatccgaaaagacatataaaagcccaagtctagagaaactgcgaaggaacaaaagatagacttcattcgcacagaagaaacgatatatcagatattatacatgaattaccaggctacttatagcctatgagctgtttactgggcaaccaaaaaggtatggacatcccgcaactcactgagcctctcttcttgtgaggactcggatattccgagtgattctccgcatgaagtcttccctcatattttgaaaatcccataactcttgtgcgtcttcctgagagcttcgaaacacgtattcccccggaccttgacaattgcctgatttaatcccggacttttccccggtcacgtgcagtgaggccggtccgggatttccggcctcacccaattgtcgtcgaagaatataagcgcaacgctcaacgtcgttattatcgtctgaagcctattggggaatgtctcgatgatgcagaatcctcggtctccgatccaacagcctgaagtcgagcagccggccgctaagcgcatcaagcggccgcgtgcgactcaagcttgcgacagatgcaggttgaagaagtataagtgcaatgagcgatatccgtgtttgcattgtaaaagtgagtgaccaggttataattagtggcggcatttctctgacaattacagaaagcggctgggattgtgtgtatcagggaacttatcgagagcgtgaaagtagccggtctgcaaagtaggtcgatcactccgcatatccagtatgtttgctaacactcatagttatgtcgccgaactggagaagaagctggaagagctgacctcgaagcttcgtgatacggaagccaaagcttcctctaaaggtcctattccaccagcagctgaaacgttatgctctatgcgcaattcttccacgccacgggatgttccggcaatatccgaggctcgtgaaggacctagagaaatttcagacaagcagactcaagagttcaatcacatcaacaccattgaatgtcacagtagtacgtccccggctgcagtcattggccatctgaagaaagagcttgagccaaaataccaagaagagcatttttctcacgcagctgattattcgatcatctcaacactccgtaatccaaacttgtctcctttatacgccactgggccggggcagatgctgtcaattgaacagtcaaactactatttcgaccaagctcatatctttatgaatggatattttgagagcattcacttcatccatccgtttgttgataaggaggactttttcgcgcgtgctaatgatctttggtttaatcgatcacgcaagcctgagccgagttttgtcgctctatacctcagtgttctatcgcttggggctttggtgcgtgtatgggatgaaggtaccttggccggcttgggtcggtttgaatggagccggaagctgtttggggaggcgcagggatacctgaacaacctgcggttttcgaatgatctcgaaactgctcagtgtctttacatgatggtgcgtgggtgtttctctatgcgtgatcgcaagctaacttgagcaggccaaagtttgtcaaaatgaactcaatccaaattgtaagtgttcattctactttttgatttcaagatctaacagaacagtggcctacatgtatcttggtctcgcagtacggacgtgtctatctgccggctttaatcgagagattccgtgtctaggagataccaccgaacgttctggatggatctcaaagacttggtggtaagtggaaagtttgtctctcgatataaattataactctaacgaggtgataggggtctgttctctttggaaatgtaagcatatcgtgcattatcgttgttaatacttactgataaattagtgagatgagcttttcggttggacggccagacacccttggaatggacgaatatcacaaccgcagcattccaccacgcgatgattctgaatttgccatcatcccatggatgattgattttgcgcagatcattcgacaagtatctgttcaaatctatcattctcgcatctcattacaggacaagttacaacttgctctacagatcgaaatggaaatggatcgttggctagcgaggcttccagaaatgatcaaacccgacattggtggatatagaccgtctcgtagtgccctgcgcgacccgaaatgggcacgaagacaacggcttgtattgggaattagtaagttatccatgggacttgttaactaactcccgactaacgaatttagggtattataatgtcaaaatgttgctcttccggcctttcttaagccactttccgcgcaaactccgacattctccaagcgaattggaccaaacttttgacaaatgtttggacgccgctatgaagactctccaggtgctacatgacctttaccgagttcacacgtttttccgttgctggtatgttcctttgccgagtatcgttcctttgctaactctttaggtggtataacacaacctatataatgcttgctacgtcaacactcctccttccaatgtctaggctcggcatgtgcgctgaaactattcctttgttgcaatctgtggaaatgggcgtggagatcttggaagccatggatgaatgtgcaacatcacaaaagtcggtagagattatcaggcagtacctcagggatttccgagcatccggagcttcacagccaccaggagacgacgaagcccaatctgaggcgggacaggtatttgacgtgccagtatgtattatcgtcctgttttcctaggatttgctgaccatataggaatgggcttatggtttcggtctgccagattattctttcgagggaattgctcagctatttgacgatatgggagacatcccgctggaataatgatctcatatacccgaaaacttctattctgtatatatttgcaccagtgccacctggggttttgaaatctatttgatatcctacgatcttacggactatgacgtcttcacaccggttggtttttggcaaccacagactcaacttcttttatcacaagggcagcagcgagccatcggaactaatgtgatgtcggcaattgttcattgttcattgcgacttggaatgggtttcaatcgacatgctcaccatgtgctccgaggccccggaaaaaccgagcaatcagccctctactcggaaaagccgaccgaccttccattgaagcaaatgaattccctgaatctctggatctcactgaatctccaatctctcattctcggagcctgctctcagattcgaactcctaaaactcctatcaccatcagaaggcggtgtgcgctaacggattatctatcccgccgatgtcgtctttacatccatccctagactagatggatatctcaccactatcatagaaggtcatcatgaacatcgccgatgatccactgcgtcctcgagaattagcctcattcaagtttcagccctctctcagtcgacatggcacgcgttactctcttctgcttgttcttcgactcacttgccataccgctgctgtagcatcaaatcgctgttgaatcagacgcctttaattccggaatcttctcaagttatcgagattgttgagaagaactcgattgttcttgaagggtatgcgacttggacaatctcgcctaatagagtattgaatcatgactgcgacttacctacgactaaaaaaacgtcgcctcgcaaagttcatattggagagtcttgcccgggagtttgcagcttatcaaatgactattttgatgactggccagggcttcaaccgctaacaaattccgccggtaattacctcgctgtcttcgtgcttggctggtcatatatactttctgcaagattgatagaactccgtcgaagaacaaatgaagacaaggtcgtctataccgacgagatggcaccatggaaatcaggccacgattcaaatgctagcgactactttgagttagatattgggggcgatagtgtcgctgaaatgagatggtgggctgcaattctcgcaggtggacgtggctggcaggctactcttcttcgagggactgaagcctagttcccgccatgggaataccatttgaatggcaatgatttcaggatatgtcatgatacagagttgccatattttcttgaacccccgtcttcggcagttgcacgagagtatctttacaactttgccagatgtcacgatgctttcgaccaacttatctgtgcactggctgctaccctgatgttgccaatgtatggtcggtttggtgctgccattgttttgcctaggcctatgcggaggcaagactcgcgccagcaaacggaaacactctttgccgatcaaatccctacattcgatgacatttctcggtatatggcattttcgggtacgtcaggtctacttgcctcgtgtctatttgaaggactctgggagccgggtattccttgcaatttggctagtcaatggctcgatcctgccatgaaggaaattactccggcccttttccaaaggaaacagccccttcctgttatttgggccctgtctgaaagacgccctaatctagcttcgttgtggttaggtgccacaattacaggccttttgccccaaataattctagtatctatgtgtttcatgccatcaatttacctcgaaggagtggcatggacgcaatctcctcaatcctttatggattctcctaaccatcgtcttgttaaaccctatagaaacggtcagagggtcacgatagctagagaggatgagttccgtctcttgtttttgacggacacgctatcggaaaaatatacagtcccaccactttgcccttattcaccattcggcgaggttgatatccagaacacctcccttgaagtcagacttcatcttgcttgcaaccacaggctagtatatcgttcttgggaatggcaatgtcaaaaaagggagacgttaagcgattttggaaccccaaccgattcgcaatcgctcaaaaagaatctcaagcatatttcacttctgtcaatctggattgtcacaggaattgcttgcggaagcatgttcaacaaaactctttggacatctagtttcactcatacggtaagtagaaggttgtctcacctatcgtttactacatgtcctagctaacatgggaattatagcaacgtagcagttttacctttctaggtagccttgcaacatcatgtattctaccaagatctttcaagcttgttgcatacaaacatattttgaattttcgcgcttgggcggccagggccatatcgatctttatctcgaagatacgtccacatgcgatacagcagaaggaagaaaagagtttgaatgatcggctttctaggattgctacacggaacttgttctcatggacgctgttcatcgatggaattcgaagtgaagaaaaaccactatggaaacatgactgattggaagatttgattgaaagggatcttagtgttgaatcgagtgaatgcgaagcaaaacaccagaacactgagtatattgaaaagtggctagaagatgccggtatacggagccaacctgtttatcatagccagattcgtcaacatacagatggcgcgaccgaaattcggacggttgtggtagcaattccataaacgctggttttgctctctcgccctctgacgagccgccttctttgtccaaatgctagagatcaatgctcgtgagtggatccaagttttcgtggggtcgagagtccactactcatgtttgatcggaattggtctaactgtgtatgggggtcttttcccgatggtccgttattggcattgaaaaagcgatgggactggaaaaccggatcacagccgacgacacgaatgccgcatctgtcctccgagatagaccttgttaaatcgctcactgtgtgcttgttagtcaatccaaacccacaaaggtggcccatcatctaccccaggttgccggcgaaaacttctgtgtaagactagtctattttaggaaggtttccctcaagagaaagtttcctatttaggacatcttctttactggaaaggtttctttgctggtttccctgccagggaagtttctatattaggaaagtttctataccaggaaagaaggaccatactgtaacgaagacatcctcggcaatcaaggcattccagaataatcatactgcagaactttgtagatgggacattgataaagatgggggacgactgttcgatatgcaaattaattcactccgacgatccgaagaatcacgacaatgaatacagtgttgaactcacgcttactcgctgttgggagcgaggatactatgctcttatccctggtggtcgctgcattgctctacttcttgttacaaagccttattggcatcccagaatatgaacaggcccgtcttcgagaattgtacagcgttccgcaacaacatctatttccagcaggggtgccttgcaatttgcaaagacggagcagaaacatttgtgatactctcatgtctccggcggtaagttactatgcgttttcttttgggcaagggcaacccttcatgagatgaaagctgtgactaacaagacacccagaatgtaagggctgttgtcttctgggcatcccaaagcggcactgcggaggctctggcatctcgctatgcctctgaactttcgacggcttttcccttgggggcgatgactgccaacctggcagactacgatcataaacatatgccagacgtaccgtctcaagcactcttggtgttcatcttgtcgacattcggtgacggtgaccctcctgataacggcaccgcgcttctcgagtcccttcaccagcttcgcaagcaaagtgccaacttgaacaatgttcgatatctcattttcggcttggggaattccaactatacccactttaacaaatatgcgctcgatatcgacggtatgctgaagggtatgggtgctacgaggctaggccgagttggtctgggtaacgatcgtgaaggcgccaccgaggaggattttgtggcctggaagaatgagagcatccagcaagtggccagaacattgcatctgcggcccgtggaacgagaatattcccctcgcatacaaattcgcccttggcgaggtggcaactgtgacacaaggcacggagtctcgccaaccgtttattatggcgagccacagtatgctcctcccactgctgataggagtaccaccgttgttcttcctgttatacaggcaaagcagctcatgctctccaaagaggccattggcgagtctgagagttcacgggaatgcgttcatctggaattcagccttgaagaccacccctccatcacctacgagacaggagactacctctgtatttggccggttaatccggaacaggaagtctcggcgctgctgaaagttttgggcgtttggaacacgcgcaagaatgttatcgatatcgtaccggcggacgatacctcgagctcgaacattcgaatcccaacccctacgaccatggagagtctgttccgttacttccttgacatatgcggacctgtgtctagggaactcgtccgtggtattgctgaattaacctcggatggtgatttcaaacgtcgactcgaggcactcacaagggatcgcgatgccttttacgaagaggttacgttgaagaagttgactctcgctgcagtcttacaagcggccacgacggtacgagatgaaaatggatcggcaatcaacgtagctgtgtcgtacgtcctagagaatctaaaaaagctacagcctcgcagctattccatctcgtcgtccgccgctgtggacccccgtattgcggccatcacagcactcgcagtcagtggccctcctcgtcctcctcgcgagacatcgtcgtgtccttctcatcgcttccgtgggttagccagcaattatttgttgcagcttcaaaaagaatacaaccgcagctattcaaggtcgcagcagccaacaaactactactactcaactgcagggccccgtggtctattggagggagggaaggttttcgcctatatccgccgaagtaacttcaaactgccaccagacccatcaactccgatcatcatgatcggctccggaactggcgtttcgcctttccgtgcttttgttcaggagcgcatgaaactcaagaatcaaggatgcgaagttgggaaaacagtactgctggtcggtcaccgagctccagaccaagactactactatcaggatctgtggcaagaggcgagcaaggctctagggaagaggtttgaagtgtacacggctttttcacgagtcgatacacaaccgcgccaatacgttcaagatttgttggcgaccaagtccgacctggttctcgacatattggctgctaatcaaccaaaaggtggagttatgtacatttgtgggtcgtcgctcatggcaaatggagtgaagaagtctcttgtggaaatctgctctcaaggccatctgcagtcggttgctgaaactgccgaaaagtgggttggagaacttagtcgcctcaggcgtttgcaagaggattcttggggatagggtccggtgatggatggtttagatcccatgtgcgtctcagattctgttccagagcatgatttgcccaggcattttcttgcttgcaaagtctcagaagctccagcagctccattctctccgcagggtcatgaatccatctgtggcctgtacaagttagctaggattgaatgaatataggagtagatttccgaaccgagggtgatagcaaggcacgcaatgacctttccaattggacatgtgttaaatcgagctgctccacaaagaacacggacgtggtcttggacctcactctgcaataattttggtcagaatgctactttgaatcgatgatgtgaaacagctttccagtagccacatagtcatacctccatctctttatgatgatcaatggcctgtggaccaagtgtcaagcgactcggattgtacatggcaaggaggagttgtgaaagcctgaaatgtacataacccgtcactagataaaagtaagcccatacatcaaacgagcaacagacccacttccacacttacaacaggcgttcaaagcgaatcttatttcaggcaatattctgccagtcttcaaatcagaatctgcgaagaatacgggttgaaacgctggccaagatagctctgaccattgtgtcaacattcgttgcagatcctcgaagtgttgcttgcgagactgtgcttcgtcatttccaaaacaaaagtcggcggtctctcctgctagcttctgcgatcgctttgtccacgtatagatgtcgtccgagtctccaggctcccagagatgggtcacatcaaggctggtacgagttggcttctgctgagaaatagagtggaaaacatcctgcctctggtgaacccagaatgctgacttggccaatttggtcactggttgttgcttatcacttgctatagtggcagcgaagacgtggccagccaagagatgtgactcagcgtcctgtccatcttgtcgggctatcaataaggaataagtaaaaatcgcgtttgatacgggccggaagcagattaggtcgattcggacggctacctttggactcttcatacaagcgtagaattacgactgatgcaagcccggccccatcggaaagtcggaccgggtcatgcattagcgctaaaaggatgtcaatggcctttcggtggaacaagtcggctcttccatcgttctggccggttgctttgcagtggtagaaagatgacactgctaagatagagtaacatagaacaggacagctgggggcaatccgaagaacttcaagtgtgaaatccgagtccgtgtgatcaaacctgcatcaatcattgccgctatggtcaacccaacgtaagcgctcgacatgggattatctgatagcaacccaccatggacgtcctatagattctccgaaatattgcatgagatacgcatcctcagaggtaagcagtagtggtgaggatgttgacagctcgtttccaatacgctgttctccggcctgcgggctcgtcccagggctgatgctgtggaacctatcttgatggattacgttatccgcggggagagactcgacgggagtctggggttgtgaggaccattggggcgtctccgatcggtccgaccgggttaactgctgagaaggttctaaagggggacgggcatcttggtctagccttgggctaggcagggtgcgggactgggagtcagggggcgacaaaggtgtgactggagggacccagtttctacgagttgagaaacgcacgttgaagcgccgagtacagggacgaccggctgtacggcatcgccgacacgaaggggttgcccggtcgcctgagcaatgtgcaagtccgaattagaaagtgccatccagtcgaggaactggtcagttgtgactaacaagaaatatgtcgtatgcggcaggcttgacagacagagctctgatccttaggtgaaaccatgctctcagacaagtaagcagggactgattggatcgaatagcatcaacgatgggaagctaaaggcccgggggaggggaggggcaaggcgacggagacacttaaaacttccccaactcagtaggtggaagactccagtatggattagcgagatatagtgccgatctcagaatgggagattggggatactactccgtagtagtatgtggaaaagattccacgggtagctccacggcctccacctttccttagctcagaagggaaagttgcctatttagtactagtacttggcgatgtccgagcctctgcatcactttgggatagaaaagttgccttttcgagcgggattgtcaccagctgccgattccacgatgatacgaactcccaaagaacagaagtcagatgatgattgatttgctgcatatatagcctcactaccacccgtcgtcatctggaaaacaaatatacctcgcccaccacactgaaaccgactggcatcatgttgtacatcacgttcgtcgcagtaactgttgtcttatgtcctgtggcgtatttcggcttctgcttcatcgtatacttatacgatgcaaaagcccttcgtcgattccaaaacttatcgttcctttctggcctgagtgatatacaatgggtatgggagtcgattcgcggtcggcgatataagactcttcatatggctcatcaaaatgcgacaattgttcgtgttgctccgaacgttctttcctttaatcacccaaaagctgctaccgccatttacggacacggcaccccaaccaccaaatcgcctttctacgacgctggtcatggtcatttcaagaatgtagccgacacgcgagacaaagaagaacattcccggaagcgacgacttcttgccaccggttatgctcttaccacactccttcggtgggaagacaaagtcgcgagccgtatcaatgctctcttgaaccagtacgataagttctgtctccggctagatgtcgcgagaagggcagatgctattccagtggatcatcgacggtggatggacattttcaccattgatgcgatacacgatattggcctcagtgcgaacctccgcctaatagagaaaggcgatgatttaatcgaggtccaaaactcgcgcggccagtcctaccagtgtcaattccgcaagtcgctgtgggggtgagttgctcgtccctttaagtttcttttcccctagggcgacccatttactaacatgtgtgctaggaacttgcggattcatgcctcatttgcctgggctccgcggtggtacggcttgcttaaaagactcacatggtgggattcgcgatggcaagacaacgtggccttcaatgatatcgtcgccactgcatgcaagcaccggatacagcgccatttagcaggagagaaactagatgactttttctcctttcttcttggagacaagaatggcgtaccgaacatgctgatgctaggggaaatgacagcggagtgttctgttatgctgaatgctgggagtgagaccaccggcatagctcttagcaacctcctttacttactcattgtcaacccaaatgctctcgagcgactgcggcgagaagtagacgaggcactggacggaatcgaagatacgaaagtcgcgcccttcgccagaattcgttacctgccgtatctgaaagcgtgcattgacgaggggttacgacttctgccacccagcgccaccacaactccacgatacacgccaccgtcgggtcaggacatcatgggctactggattccgggtaatactgaggtgctttgtcctacctacagcctccaaagaaatccagagatattttcgaatcccgatgtctttgaaccagagcggtggttgagtgacaacgctaaagatctgcacacatcgtttctccccttcagtgcagggccaagggcttgcattggcagaaacatcacgtacatggagcaacaaatgttgattgcatctctggtgcatcgctatacgtttgagttgattgctcctgatttcaagccagcgtatgaagaggccgttacgtgctcgccgggtcctataccgatctatctttttagacgagatgaaacttagaaactcttacgtagatggcgaatcaatacattgaatccaaattgttctggcatctcatgattttcatcgtatagcgtgatctttggggtgttgatattatgagtttggatatatagagccttttgtgacaaccacctttttgttagaaattctaaatactacctatattgatttaaataatatgcccagacagaatgtcaagataccgaaaaattcccagaaaagtagttgttcctcgtatataaaatggtaacatccagtgctttcaccactaaacgacaaaaaggcatcaaccaaatacaatccgaaaataaaaacgaagtcaaaaacaagacaatcaaagaccccaaaggtgaagccataactcggtagccgtccacaccgcgcatctctcatgaaaccaactaagccccctccaatatctataaaccgcagtctgattctctcacgaagagagtaattccatagttcacccaagcaatgagcagactgtgaaattgtcaagccaaaagaatatccagacccgccctcgacgtatcctctttccaatatcctcgcatataacaggatcacggattcggattctgcggcttattcatctcgctatccatgcgtccacagctcgtattaccacgaccatcaccgtatttcgcatacgcccgagcgaccctcggatcgacataagaattcgaagtagacgagctgcgactcagtgagcccggggatgacggggctggggatcccgaggatcccggtgtttctgcagatgcagccgccgttgctcgggctgcggcaactgcggctgcagctgcgggatggcagagcgggcagggggagacgttcaagccacaaccgttgcagctgcggcagattgtttctctgggaattgtgttagggttgggatggagatgtaaagggtgttttgtatatacctcggggcattccctgcacaacctttgcatgtgactaccttccgtcctccaacacatgatctgtgatccggatcgaggttgtacatgaagtgggtggaagtggccattgtaatggatgtagagatagaagggaatattggaaggtaaagagtgtagatgcggatagtgaagtatagtcaagatccacctgatataaattgcagatggctttgtggtattcttcccgttggtgctttctttctctctcaatggaaagcctgtcaataaagaatagccagtaattgtgagccctgaaagtgttgttgggaaaggaagacagtagttataggctaagtccaaagccagaaatgaccgagaaacaacggatatcttatacaagaagaaattaatcagtgccaccaacgaacttcccgagagtttccaagtgtcacatattcgatatgcacgacggagcgtggaatcgatgacaggaatcaggattgagtccaccagaatgatcagcaggccaaagcgagagacggtgataggacaattcgccaggtacatgatgtacgtggatattccatttacacgcatggggccattccactcaaatcctccagttattcttgaataaaaagcaaaaaaatatgatccaacatgagaggggaacgacacagaaaccgttctggacttagttgagttgtcaaacccccctgcctacgtgcttctgtcgagctaaggtagccagctgcggaaatacagggttcatgaaacaggacctggtgggggattggcgtttctcagtccacacgaccgggcctacgtcgttcatacgttttgcaaagggttcattcgatggtcattctgtgggagggtttttagcagaaaacatgtagtgaaaccaagatatcgccaaattggcaactcaacccttgatctatcgtcgggcagaccgtcgttcatgcgcggaaaagatgtcctggctcctaggagcatgactgccacctcgtgatacaaatcttgaccgctcaaactatataattatcctcccgagttggaaggttgatatggccacgagtatgggatgtgaaatgccaaccacggatagttgcattgggccatgcgatctttgggatgatgtatagatgataggggccatggatagattgtcgatgatttcttcccgtggaccttttggtcagctctcgtattccccttgtgggatgagctttctatcccaacaaatcaagtaaagtacggaataccatgcatggaagttggatcagacggtcagcagcccatataccggattcggaataggattcaaggacttctatggagtacgttcttaagacgtagctgtcgtaagcagcaaaagggaaaaggcacggtgacaatctcgtgcaaggatcaacccgatgcaatgatcttcataatccatatcccattgagaagccatggttgtaagcacaatctccgataactgtagggccgacacaaacaaatccggaaaaaggaaaaaaaaaagaaaaataactgaagctgtaaaatgaggtgaaaagagagtcctgtgagaggtgtgagccaccaataaggaacaagaagaagaactcgaaattggagtcacagccaatcgaagttcacagacagccctaagccggaagcgtggatgtgacacttagcctcaagcaggtaaccgtagaggggctgcaaggacaggggcaccgaaaaagcccagaaaccccctttaacatttccagtcaacattgcaaggattccttgcagccgtttgacttcacgtcgtcattctgaacggacctaaagcgcttctgcagattggtcacatgcagagtgagtcctgtggaaatgacacacatccatgaaaacctcgaatccactcatctcggagttttgtatgcagtctgccaccggctaaaagctcaatgtaacctaaaaatgagctcagatagaaccaacgggtatgcgcgtcattaggcgagccgcgagataccaaaaatttcagcctctgggtgatcgtactgtatggaagagagccggaaaaaagcccagcttcaaacctccatgggcttgttcaaccggttcgctgttggggaggacacctgcagccagccacttccaatcacacgctagcccaggattcgaagtccaaatttgaagtcgggctggagtcaaggtgcatgggcggcaagttgcatcaacggagaagtttccatcgatgtctcaaaggagctatctgagacttccggaggttggttgtcctggaaccagaatggttacaaatcagctttcggcaattagtgtcacgattaaagcccgaggatgccgggggcgaggaaagaaaataaaaagaaattatgaaagtcgcacgtaaagggaaaaagagcgacttggttgaagtcagctaatatgaacctgtaggatacctgcagcccagttcgcattgttgctgcaagaggtgagtctcggtcaccttttcttccatggcgtacggaaatcatgccaggcaaatgctgaccttcgaaagtgaaatgatatcacggtgcatttccaaatgaggccacccaagactacccgaaactggtacctggcaggcactgaaatgctatagcctaaagaccaggtggctcataggtttacagattacacgatgcgcagtcatgaaataaaggattgtcattctccattacgatctgcatagctatcacatgggaaagaataaggtgctacgtggcattccatcttaaagagtcgtgtgtgtagccacggtaaaaggggaaaataaagaaatagggcagaaacaaattatccagccaatgaacgccttcgtggctgccacggccacaacgcagtgatcgggtgaggatcttgcgtgcttgctcatggagccacggcataaaaacagcaaagggggagaggggggaaacaaataagcaccatgatccatccttccacgtaaagccaggacgcctgggtaattccgaaaacatcaaatcgttggaatcacgccgaaactcatgtgtcggcgttaaatcataagatatcaaagggcagagagcagagagcaaaagaaaccgaaataagggatgccgatcactggaagtattcattgggcaaggatgctagcacagcaatagttcccaggccacccagcagagcgctgatgacagccgtggtggcgtggcttgccaaggactttgaggttgagtggttagacttgattcgctttgccggacgctcattctcagcaaatgcagagacattctcagcaagtgcggagctgatcgcatccttggcttcagaggaaattgtgttgaggtcgagatccgactggctggttggctctacaggcaatcgctgagcatcttgagaaatactggcttcaagagccgatgattccatctctgttgcagtacgcttcaaatgtggttttctaaatgttgccaggcaggcatcttccgcgggatagccggtcgagaatggtccatcgtgatagggatgtttgaattcatgggacaaggacggtaccccaacaaagctctcgatcttccgttgcattggtgggtatttgttctgacatgaacttggcagctcaccggaaacagtgtgtgtcgggaaccgagcacctgggtttgtcataccaggagcagcttgtcccatcaatggtttgctctcgatacgtgcggggttcagtgactggccctcaaacggctttgcagatacatgctcgggcacttcgacagcatcagtgttgttggcacgttcaagtttcttcacaagctccggaccaagcaaggaacggatatcaggattttgtggaatatggtgttcaaggcacccattgtcagagcaatcagagtcgttttcggattcatcacagatctcgccatcttcttcaaagtcctcggcataatcttcctcaaagtcttcttcctcgaggtcgtccgacatttcacagccgtctccgtgaatcgagtcgctgtcgtacatgagacatggatatctggggtagctctccgaggaatcactaagagcatccgacttagttgtgtattcctcgtattcttgagcttcttcgtctgaatcaaccgactggtcatcagagagccagttttcatcgaaattcggatcccagtaaggagccacatcgcaccatcgatctccgatcattcggggctcccaggccctcacgatccagcacttgtgacagtcttcaacctcggtctcagtctccagctcgcgcttcaggtcttcgctgagaagctccagtggcttttcaacgatccaccaccgattgctcacccgctcgccgccttcatcttcgttgatgacccaatatcttcgcttatcgactgaccagtaccgaagaaggttgccgggcatacgatggaacgatgtgtctgagtcctcggagtcaggctcccagtagacttctgtcccaacgcaaggtcggaagctaggggtatcatctacccagtacgaatcttgggaaatagaacaacggcgcgccgcgtgaatgatgtgcctgtcgtggtcaacgtccggtatgttgttggattcaccccaagccatgtctgccaggcgcatgaacataggtcgcatcatggtccaatcgctgtaacgaatttcaggtacttgctggtaacagattgcagggaggctatcttcatgtgcttgttgttcagatgcaatttcagcagaggccgactcagcgagatatatcttggcatctgagaccagtttggcgggagatgggttggtgtcggagaccggtttggtatcagacagttggccaagaagacccgggaccagtggggtagggtcgggcacaatcttggagataggctccttggtagcaaacacagttccccaaaaggagttgcacccgtcctttgaatgttcgtcgctctggacactctggacactcgaggcaggagaaactagagatgtattcataggctgcagaacagtagtttcccaagatcgagcaacggactccttagaagagtcatcactgggtaggtcggtgtcctccatatcgctatcgtcttcggggacagagaaactgttggttgacggacttggatccggtttgatagaaatactatcgtctggaatgaccacatgctggggtttgagccactcaaccttgcagctgacttcgatgggctcaaaaacttctgtactcgattagttccagtgctattagacttagattgctaacttgccttggccacggtcaacatcgacaccgaatcggatgatgtctccgttgcgcagcggggtattcacgtctgtcaccagctttccaccattcaggaaagtcccgtgtgttgagccacagtcggtgatgaaaaccatctacaagggaggtcagcggggtgatctggtcagaattgggggatcaacacaacattttggtttggtagtatcttaagcaaagcatggtcacgagacatgacctgagactcaaaccaagcgttctctgctgtaggattgcggtttcgattttcacgctttgaggcacgcccgataggcacggtcttatcattgtcggtgatggtaagggtacgcagagggtagaggtcttcgaagagggggacaagcgtcacggtggctgtgaattagacatgtcagttgcaagtaaggtggcaattagggcatccaagtacttaccgcttgggtccgacatggtgaaagatagatgaacgatggtaggatttgaaaggcaggaataggatgctgtttgtttctagataatggttagactgagagatagaattccatatatgataagagcgaccatgacagcaaggtagagtgagtcacagagtatcggaagatgaaggggggtgcagaaggttaagggagttggagacaaaggcagcttacccgggtggttccaggctgcaacacgatcacatggaccagttgagacagccaggagatatcaggtgtattgcagaaaagtagattgcaagtagagcgactaggagcagcgaatataaagagttgttcaaagcacagaaggtgaggaaggataagggaaggaagaggggtaggttcgtgaatcaggtagtagttaggttcaccgctgacaacgcggacaacgcgggccttgaggagtagcgactccctttggaatgggactcaacttggttctcagttactggtaagtctattcaaattcgaagaaagtcaggattcaacacgaaactaagaagtaaggtatccggaagctcaggaacaatgaggtatgtatgagaagtgatagtataagataagcgaatgacgccgttggacttatttcgatgcctcggctcgacaacacttccctattggacacagactggctaactaaagaaagtatatctcaacctacgtactgagacttttcgctatttagttacttcctttttcgttgagacacagaagaacaacagagtccggagatgccgataaggggtggggtcagctgatgtggagacacacgtcatggtcatccgcacactagggggaactatgtatacgatgcaaaccatgtaaggaggatttcagagtcagtgagagcttttgaagtgtattgtaggtctgatgttaatgagcactatcattttcctctatggtacacaaattactacatggtcagaccccaatgcacttccccgggctcggtctgccgtccatcggcctatctcatcccgagtcttatctcagacagaccaagtatcaaaacaaaaagaaacgaaagaaggcggacggggaatatgtcaaccggtagtaaatacatgcggggagaatagtgaaccggggatccaaagaaaaaggcttagacaggaatacccaaaccggggcaaagaaagacgcgaagaaacgaagagtgaggagggtccgctgacttgcttacattccaggagcaccaccgttcacggcacccatggagttcaggcgggcagcgagctgggggtacttctcctgaacctccaactgggtgcgggtggcctcagcgtaggagatggcgttgatgatctcggcctcggtgcgagccagctcagcagcgcgctcgaagtacttgagagcctgggagaccttaccctgctggaggagaagctgggccatggttccgacagcaatgtcgcactcgggatcaatgatgagagccttctggcagaggttctcggcctcctggaagtcgtgcttccactggaacaaagcaagagccttgttgatcaggggcaggacgttgatacccatgggcttgctctgcgtctccatctcaacagccttgtcaaacttctcaatggcctcggagtagttctgctggtcaagcagaagctcgccgtagtagttgtatacatcagggacttcctcgaagttctttactgtgcggcggaaagtggccatcgccgaggcgacggagcccatcttgtattgtgtgacaccgagctggatgtgagagtaaatgaacgaacggtcgaggtcgatcgacttctggtagtccttggcggcttcggcgagctcggtcaggatgaagtgtagctgggcacggtggtagtagatatcggggtcgtccttgttgtgagtaatggcaagctcaaagtcatcggccgcagcgtccttgttaccaagctccaggtgcaagctggcgcgcttgatgtagctctggaccaaggaaggtgacagctcgacactcttgtccaggtcggccaaagcgccggtggcgttaccgccgaggtaggtgaaggtggcgcgcatgttcagagccaatccttcaaattcgtcgagctcgccgagctcaagtgccttctcgaaagcggcggcagcctcttcgtagccatcggcagtcttcttgcccatagcgacaagacccttgcgcagctggcccttaccggactcctcgctcaactcaatcgactcatccaatccctcgggcaagggctggggacggaagctctggaggtagttggagacaaaagtagcactaggcaacttcttagtgcgcgcctccagaatggcctggctcttcttctcggcaaccttcttcagcaagcgttcaagcgagttgcggctcacgtcgttggagaaggcatcaatgatacagctggctgtgaagtcgaggagagcctcactgtacttttcaaggtgctcatacgcaatggctcttcggttgagggccttaatgtattcgctgtccatggcgagagcggcgctggtgtcctcgacgaccttctcccagttggactggacattgtagcatgcggcgcggttggagtagaagacggggtcgggcttgcagataatagccttgccgtacaattcaatcgcgctggggtaatccttgattccgtaggccttgttaccggcagccttgagcttggccgcatacgcgttccgggtcttgacttgtcagagaaagtgtgggaaagaatatggcttaacatacctcttcagacagctctccaatagtggcctcatcgacttcgggaagctcctcgacaggctcctctgcctttttgacagactctggaatctggtcagtcatacgaccaccgtgtttgaacaagaacacctaccatcctgcacggatgcagccttttgctcctccgcctttttcttttcctttcgtcgctgatttttgctcttcttgggtgctgagggagtgggtttgcggggatcgttcaggtaatagacaacacccgctccggtcacgacaacggcaacaccggcaatggtgtaaacaacggccttgttctctgagacccagctggtgatgcgatcccagactgatgccgatgatgactcagtcagctttgatgtatcgagcaccacattttgggcgggcgtaggtagcggcagttcgttcgacatgatgtgcaaagcaaagggaccgacgcgactagttctaaatgtgggcagatgtcagtactcaatccaatgtttggcgcaattagactgagatggaagacaaaggggtcacttaccagacctcgacagtaggagttagagatggggaagttcgggaatgatgaagctcagaggaaaagtcaagggttccgctgaccgggtcggccaatcacgcgcactgcgccggtaacactccacaaaacatatccggattaaacagagtcggctcatcaggtttcttatctcttatactcttccctttttgtccttcgaattgcatccgaagtaacatctgtgaattcatttcctatttggcaacactgacctggcgaccacagtaacgacgttacgccattgactgtcgcaaaaatgaccgagaactcctcaagcccagaatcattcgagatcttttcttcccttcgctttgacccaagccttccagacgcagcctgtcgccatgcatcgagctatcccgatcctcaaaaatccccctactacctcctcgcctatcaccaagaccggctcacagccgcagcggctcatttccaatgggacgaggctctaaactggctgcagcaagacctgcaagacttcgaggcgtttctcgacgcgtcaatttcggacctaagcaaggcgtggagactccgaattgtagtgaacagtaaggggaaggcgagagttgagacgaacccaacagcgagcattgatctaatgagtttgttcattccctctctacatacccacccaagcgaaccaatatggcacgtccatgtcgatacgcaatcaacaactccttcaggtttcaccacacataaaaccaccgcgcgggatgactacacgtctgcgcgccagagggcgggaattaattccccgacagaccttgccgaagtactggttgtgaacccggatggcgaggttatggaaggcagcatcactacgccgtacttcttgcgggaccatatgtggatcacgcctccgctcagcagtgggggcaatgcaggtacaacacggaggtatgcgttatctcagggtttctgtttagaacacaccatttcccgagatgagcttgtggatggagaggagtgttggttgagcaacggcgtaagggggttcatccgaggggtcatagtcaaataagaatttcccatacttagtatatcttcgataggtatactccgtatatgtggacgagtcgatacttgaatggtattgataaattgatcaaaaggctatgaaatcatccgtatttttgaacatgattgctccagaaaatgctccatcacaggtctatttcttagccttctcaatcaccactgggttgggattccccttccactccaagggacgaggacgcatgtactcggccataatctcgtccgtaacctgtgctctgcgctcctggaacccttgaacatacttctgaagctcagcgatacacttctgcttgatctcgccggtcatcatcttgccaccctcgtaatcggcacggatgcgctccagctcctcgtcgtcctcgaggaagaatgtcaagtactggaatgggatatcgtttttggtgttgccgcccagctcgcgctgcaactccgcggtgtcctgaccacctgagaaagcgtgcttgttgatcttgttcttgatcttgttaggcgtgtcgctcatgaaaatggcggaactgtcgacactggcggacatcttagatccaggtccctgaagggcgggaaggaagatagagtgaatgagagagggcttcttgtacttcatcttctctgcgtgttcgcgacattggcggaagtaggggtcctggtcaatggcgcatggaatcaaacaaggaatcgatgccaccttcttcgtctcggtgccgaagatgtgggggaaactggtagagaaggcggcggcggactgggtggcacagaagtggaactcgccaatgttgttgctgtcgttaaacccaaatgtgcccttgacctggttgattgtaattctcttggccatgcggcacatgttctcgtagaaagcaccaccaataaattcgaaatcactgaagataaaggtctttttcatatcgaatccaacagcaatgatatccttggcgtttgcttttgtgtatctcttggagtcctcaatctcgatcttctgggagtgcataaacttctcgtcgtcggtcatcatgataacgaggggaacatcgaagacgtcctggagccatctacatttggattagttctagtaatgtcccggtgatcgagactaaacatacttggtgaactcgaacggcacagtgtgtccgacgtgcatgctatcactactcggcccacggccagtgtagaggaagaatggctcgcccttctcatgcttatccaaaatcttcgacagatcacggtgactgaacacaatactccggcgcatgaaacggtgtggccggtggccagtcactttctcgaagcgctccaatagagctgcattgatgggtgtggctccaaactccctcgtgagcttctcgtaatcgaccggcaacagcttgccggattcatcgaccccaccggagacatcgaagggcgtaacgatctggccaacggccttggtctctggggttttctcgtcgatgctcaaggagttgagcgccggaggctggattgcttcgttggccatagttacttcttcgtctggtacaaattgtcagttccaggtgttcaattgtatcagtcaaaggccggttctcactttattttcggttgagagaatcgtgaatttcttctgcccctctccaatatcgcgggatgagtcaggattcccgctatcagtgggcactctgattggtcgatttgatacattatcaggtgaccagtcctagccccgcgaaagcctttctttgtgattgttattgtgtttgttattgctgtcttgataaattgattttgagttgataaaagtgtgagactctctattacattaggtcggcatctctgttgtctttgcattgcattcaaagtttatatctggaaacagagtgcatcaagaccgatccggcggaagtatatactaagacactcactcctccaaggccactagtacttctttttataaactgcagaaaaaatagattaaaccaaatttaactcatccctatgtccatagtatagacgcttctcaggccccccacgatagtaacgagttgaagaaattcggcttctacctactaatgtaggaaaggtggccataggacgtaaaggtcgcattatcctatccaaaaagccagcgaaggagttctcaacagcattagcaataaaggctaaattatacgaggcaggttctcataaacgcctgcctgtaccaggtaaccttaactcaagtactatagggatttagactaactactcaaactcccagagaatagttagtcacattttatcgtggaccttctaacttagtattaagacacaccagattcccaagacaattaatgaacagcccgaagacatcttgatgacgtccatcttccagcgccgatcatatgtcttaagatcaacattccttcccacaagttagtaagagacacattccacagagaaacaccggccatcacttgacgaacatcggaatgcagtttttactttggaacagcacaggatccagacttggcagccccctgcctatcatgcaccgatctagaatccctgcccaaagctattgtagtctatatgctttcatgacatgtatctcgcgtataatgtatgtgttggctacaacagcgaatatatagctcgtctttttctcgcatgcagtgcggacattgtatttatggctgtttcgatagacgcggaagacgagcctggatgtataatatgtagtgcagtttcgtattgaagctgaggcttctactattcctctagctatggctggtatcgatggcatgtgtcaattctatattcaaagaaacaatcataaataatgtcggagatacgtatggctggttccttaaacacaaccactcgatcatatttgtctatatactcggaatcgtcttctgctttaggaaatcaactatcatcaaatgaagcggatgccacccaaatcccccacctacacttctacctatgcccaagatggggcaaatgttggatccacatgcgctagcgtggctaggcactttatgagatcccactgttgtgggatctatctcagaacggtatccatcttcgaaaaaaaaaaaccgacggtctagagccaacgtcattcaaggatcacgatgatttctctcccgtgaaatgagacactctactaggacaccccggcttcccgcataccgtcagcccaacagtctcagtcaaagtgatagagatgcgctgtactctactccgtactcagtataccagcccactttcctagctcccaataagcacctactccatcccaccaaccactacccaccttgccccgtggatgcgcggggttaccacccctcgacccgagactccatgcagcaagccgccgctaagaacgccttattcgacgggcctgcaagccactactccgtatatccgacccccttacgccggactatcgagtatatctccaaatgcgtaaaccgacggaccacaccccgtatgattggtgacatccgtcggttaatagcctaggataacgaagtagactttggcgggtgtgtcactcatgtttgagattctgccggtaagcttgtgttttcggtctgctgcagatgttggtggcttttttgataatcgcacgttattgatggttttggttgagggagaaggactgggatttgatatcggctttttggaactgtgggaactccgaaggggtccggttgacacgtagcttttgtcgtgttctgtgggaagggatccccgcttgctttgttggctgtatatattttgtgatattttgctcagtctcggcgttctttgttttatgctggggttggtttcactgcgtcggattattcccgtggtgggggtgaagtgccgaggctatggtcttataaattgtttttggactggacttggattttaattttgactatgggctcctcgatactctgttgtaggtttcaaactcctcttgtagtacagagtacagcaggaaggtgcaagagtatgcaggggcaaagggcaccactgccgaaacttactgcaacctcgatttacgttctagtaggaatggtagaaatacttactattatctatatattattcgccactgcgattttcagggactctcagtgggtgaggtgaagaagatcagctctagatttgcacctgggcaaaatacgcgatagtatgaaaccaaagccagcccagtatgcagctagctcaatcgggactaatgtgtaggttgcctttgcttttgtacctttattattagctcatatttgactctaacgggtcatcgtatcgtttagatgttactttgtctaggggatgatggtccaacacgaagataagacaaatacctcatttgaatataagatttaacctttctaaataaaggtctgcaattatacagcttttaaccaaatgcgccactgctcaagagatagctggatggttggaggcttggacgggaatgcaagacatgctcacaccgcaggccatcatgagattgtatcaagcacctagaacaagttcaagggagattcagcctattgcgccagccagtcagcgtcaacggtttcctccctacacgcgtaatgataggtgtcgggtgatgcggcggagcaaggcaacacggatggtggttggctggatagaatctcctatccagctcagggatagattagcttcagcagaggaagtagacggatgacatgactgggtaaatcactgtttagttgggagttagtcgggacgtcactgtgttgagttaggagcgtgcgaatcagaaatgaccaacttgacgcatgacaccccggtcaatcaccgactggacggggatcttgatcttttttgtttgttttgggcgtccattcccgctatatctaaacttgattatctccatttgtgatatgaagaagtgaattttttgtcttttttgaagtctagcccttgggaagagctgggtcaccgggcggctgcgcgtggagagcgatgtactcggtaccttgtgagatattggtttcacaggtgcctggcctgaagcttttaagaaggacgattcctagttcctgtctcctttctctctcactcgtcttgaagagattgaacatattagggcaaaggagttccctgcagtcccactattaaaagcggcaccttcgtcatcccgtccccccaatcttccaagaagaaaaagaaaagtctggatgtgagggcatcggagtcctcggactcgtctaagtacgcgatttctatttttttggtctcgtttcattggatttcccagtttgtgcctccttttctgtattttgtcgtcattggcaatttcttttgttctattcttgactctttggtggagtttccccccgcaagtgcttcatgcacactaaccgggaaaaaacaattagatgcaacattctccctcggattccccttttacgttttccttctcttcttcttcttcttcttcttccatctacctctcgtctcgtaatagttcatttacaccaagtaagtggctcaattccaggcttttgtctttttcctagcctatacctcgggttcgatatttcttctatgactcgtaaaacatattctgtcggctatcgcgatacgccttgcattcttcgctcaacacatgtggcattctcatactaacccaaatctccaggcctatcatcggcctcgtatcgacgctccgcattccaaccaagagatcatcttgaaagtctgatcacgaaacacggctaccccacacctgtgtcactctcctctctgcgagatctgacggccacttcgtctacttatactcccccttcgcctcggcccagttacccggatcccagtccgatcgacacttttgactcatttactttatcatccacacgacccattcctatcccaagacgccccggtccattatacgaggatcttccagtgacaccactcacgggtcgattcgatcacgaatcttattttgacgattgggaacgtgcgtctcagtccgccaagtcccgacaaatacttccaatccggcctgtccgtcggtatccatcgcggccgctgccatcctcagcaataatgcgtgctgataactcaccttactactcccctgctgcctcacctatcatgtccccacggcgctcaaactctccgcagccaactcgctgtcgtgcccagaacccttccaaagtgaagcaaacccagaacttccacctcggcagcctgccccggttccatcctgccgtatatcagtcgagcagcacttctcacaacgctacagcgcagcctccatctcctcaccagtctcggcagtccacctaccgcactgcagccgggtcacgcgacatgatgtggcagtaccgtgaatacatcgagggcgtccaccaaggtccttcggcgccccgtttggatcctctggttagtccgggtcccgtcacgcccctggcgctagaggcgggtgattatctcgcccatggctccatgaacaacacatccgagcggatcccgcgagatgtcccgaagaactccggccctccggctgagctggtggagaagctcattgcctatgaggagatggcccgacagatggcgcgaaagtccgccaagggccgatagtagactgtcccaccctggctctgcatcaaaatgtttttgtttattatccattagagaaatgggaaccccccgaggttcttcctgcctgttcattttatatctgttttattggtattcgggaacaaatgagctcactccaggctgatacagtgtgcatgggtcttttggttttcatctcttttttcatctcctttttgttatctcgtcattcttacccctcatggtcaaacttcctcggcgtcggccgactactgtgtttgatcttgcatcacggcatcatgtatctaaattataccccgctctagtccagtctcggaccttggcacatccaagtttcaaccttcaatatcaaacatattattcatcctcctttgtttgaccacaccaccgtggcagctaccaacctggcgccgtaacgtgtccttccaaaattaattgttacggtcgtaagccaagtcccctgaggcgtagtggacatgctagtttgacacttggaggtgtctgttagatcatatccgcttcacttgcagcccgccagggcagccgtgtagcccatctggagtgcctttctaatctccagtaatctctagtaatctagacaatgaatttttatcatgcctttttttttgatcttgtacgactttcacccggcttcccaccaagtcgcttcgagatcagcagtcccgataacccaaatcttacagggatgatatgcagaccttcaaagctaatccccagatttactactcccattagggctagctcaaactgtagctcgaaatctccaattcacgcctaaggcatcacccgcgattcggaggaacactcactctccccgagaggagtctgcggggcccaagcgattatcataccgactcccctcgttaatattttcctcaattacctcattgcagttcatatatataccccagcttccccagacaagacgcgccggcttgcaaaaaccctccttggcagctcagcaaccccaaaccactctatccttatcagcatcgtcatcacatttccaaggttcgcttttaccgcccacgcgttgcgcacgagcaccccacgagtccagcaggcgtcatttccgtgacgcattggatcgccagatccaggatcggagattggggaaattgggatcgagattcgattcttggacgatgtcatcgacgccggcgcctttacctgtttcggagatgacgagccaacagaaggagaacgcgcttgctcagtctgggacatcgaagtcgaattacaagggctttgtggcgggtgttttttcgggaattgcgaagcttagtggtaggttcaagtgttctgtggtttgagttggggttgaagctaatttttgtttttttagttggccatccgtatgcagaactgaactaaccccttcgccttgggtcaattgttaacgaaatcgcacagattcgataccgtcaaggttcgcctgcaaactagcaaagatgtgcagttcaagggaccgttggattgcacgttgcagactttgcgaaaggaagggttacaagggttttacaagggagctacgccgccgctggtcggatggatgatgatggactctatgtgggtgttccgcggtatcaagaggaataataggaataatgctgactgtctgcagcatgctgggctccttgactctgtatcgccgattactactcgagaatgtcttctcgaaacctcacctccgctcttacctccccttctcgcgctaccagccagacctcgcaactctccctagcttcggacatggcattgcaggtatcatggccggtacaacggtcagcttcatcgcagcccccgtcgagcacatcaaggcacgtctgcaagtgcaatacgccgccgacaaatcgcagcgcatgtacagcgggccgatcgactgcctgcgcaagatggtgagtgccaatgactacattacatatacacccaccgactaacatggacaggttcgcacgcacggcatccgcggcctctaccgcggcctctgggcgacaatcttcttccgctcgtttttcttcttctggtggggctcctatgacgtcctgactcgctacttcaaagagaacaccaagttgtccgcccctgcggtcaatttctgggccggtggtatctccgctcaatgcttctggctcacttcttacccgtccgatgtcgtgaagcagcgaatcatgaccgatcccatgggtggtgcgctgaatgacggcaagcgacagttccgcggctggaaggacgctgcgatcgccgtatggcgcgagcgtgggtggagagggtactggcggggcttcgtgccatgcttccttagggcgttcccggcgaatgctatggctctggttgcgttcgaagccgtgatgcggaccttgccctaactccttcacggtctacggagaacacgaacccaaaatgattacatatagaactttcatggctagataataaattagatgaacatacccgttgtttatgcatgatttgtctccgatgaagttaatctcggcttggggtagtccgcgatcaggaatgtgtgctctgtagcgatgagccgcattcggcgatgagactcttcggggccctccttgaagcatcccgagatagcacggagatactccagggtctaagcgaatcccaattcgtaattgggccatgcagctgggattgtgagctcggccgccgaagggtcctcgatagtgaggtgacatgggttgtcttggtgctgtctcgttccggacaaggcaaagaataaaacttatacattatccatagctgttctctttaaaacttacactctctttcacgtcaacattatttcccgtagtcgtcagcaggggaggaattgaggcaaattgaatctggttccttagtgcctgaggcagtcccgcagtccacgtcaacggtttcaccagacagcgacaacgcctcaaatctccaatttaacgaattaacgctgatcggccatggccgttgcacgctccatgcgccgcacgagcccaatcggcctcgtgctagcagcgctgctagcatttggcttcatatgcttcatgctctcgccctcaactccctccgcaacctccgcatccgccagctcccaacagcgccaggaaaacgccgccgaacaccccctctccccgccgaccaaacccttcttcaaatctcaagccgtccgcagcgatggcttcaaggccgccccgccggtcgtgcactacgacctcaacagcctaaccagcaccgcggactccatcgccaacggcgagcggatcctcatcctcaccccgctagcccgcttttaccaaggctactgggacaacctcgagaagctgagctacccgcacgagctgatctcgctgggcttcatcgcgccgaagacaagcgacggcaacgccgcagtcgcggctctggaaaaagcaattgccaagacgcagtcggggccaatcgacaaccgcttcgcaagcatcagcatcctgcgccaagacttcgacccgccgttgaaatcccaggacgagaaggcccgccatgcaatggccgcgcagaaggagcgccgcgagtccatgagtcgcgcgaggaacagtctcgtcttcacgacgctcggccctgcgacctcgtgggtgctttggttagacagtgacgtcgtcgagacgccgaataccctcattcaggatctgacggcgttcaatcagcccgttatcgtgccgaattgcttccagcgctactacgattccacgaagaagagttgggatgtcaggccttatgacttcaattcttgggttgatagccagattgcgcagaacctcgctgcgaatatggggcccgatgagatcctcttggagggctacgcggagatgccgacgtatcgtaccctgatggcgtacttgccagatatgaaaaatctggatccgaagaggatgcttgctcttgacggtgtgggcggtacggccctgatggtcaaggctgacgtgcatcgtgacggggccatgttccctgccttcccgttcttccatcttgtagagacggagggcttcgcgaagatggctcgaagactgggatatgaggtcattggactcccggattacttcgtatgtttcgtctaatctgcatttgcagagatggggacaatcttgctaacatgctttttctttttttttgcaggtctaccattataacgagtaaatggttgacagcctcgtttaacgtctatttcacttgcatacactgcgctgtgcgcgtctcgacgcctttctcgtctctctgggccattcgagagattcattagcaacattcagctccgtgtccgtctctctgttgagggggtttatttcatacgtgcttgggatggttgtttccccaggtctcaaaattgactttgcattattctgtgtattaccaaggaatatgagtgggtatctatttatgttggagaggagttagctccaaggaccaagggcgttgctggcttgatgattcttgtgcatttattttggctctaacatggctatctccatgttcaatgaacgttacttattcgtgcaagattgaatttaaatgaatcatattagagacataaaaagcaccatagtatctagtagcaaggcgttggtctatttataactcgtcacttatgtatccttttcaacgagccagaggtatgaacttttgtcgtgccaaggctaacagtgctgggcacagtatgatattaccggtgtataccagcatataccaatgtccgatacaacaatcaatcccaagaaatactataaagcgtgtcagtgatattgtgcctggaaagcatggcggggcgaatggatacttacgcaagcataataccggctccaagagcaacagccaagaactgcgtgatagtcttccgcacctcaacgcccttatccttgccagtctccagcaactccggaatcacagccacggtgccaacatacaagaatgtgcccgccgtgaacggaagaagcatatcaccccaagtaaggctagttcccagaagaccagcagacttgctatcatccaacatagtgccattgccaccgaattcctggacagcgattccaataaaagtgcccaagaacgcaccaatagcggtcacgaattgcgcgcccatggccttgcgcttcgagaagccagactgaatcagcagagcaaagtcaccgacttcatgggggatttcgtggaagaagacagccacagtggtcgtcgcgccgatagtaggtgaggcatagaaagaagaggaaagagcaaggccatcagtgatgttatgggtgaagtcagcgatgagattcaggtaaccgccaagcttgacgctggggttgatttctttctcgggaacgacctcagcggactccttggcagcagacttgcgcttcttcagctcgccgctggtcttcttgctgtcagctccggatgtaactgcatcgactggttctgtgtgcgcgtggctgtgcgagtggtcatgaccgccctcgccgccagtggcgatgcgcagggttttgtccattgccacgaaggtgaagaatccgaccatgattcccagacccagaaggaggttcttgtttggctcgaccattacgaagctcacgtggtcgggggaggcttcgccgacaaagatctcggggagtaggtggaagagggtgtcgccaagtaagccgccgacggcaaatgcaaccatcactgacagagaggaggggtcgatgttgggtgggcatagtgccaggaggaagtctagagcagttagcagaggcatatcacgagtaccgagggaatacttactaggtgggccggagatatacaaagttgccagaagcgcgttcacggctggggtgctcgggaagaggacagcaaagatcttcgctgtcaagctagtggactctggacgagttgcacgcttgtgctcattgagagactcgactagtgggcagctctgtggcaggtcagtttacatgtaggacacacagtacttgtacagcatacctgcaattgctcctcgatctgacccacggagagccctccgggaccaacattagctgcagctaaggctgagaacaaaaagcatcctgcaagaagggcaatgcctgtcctgcgtgatggaaaaaagcgagaagccattgcgaatgaattggccagggtgctgtaaagtgacaagcaatactccgtatacccacggaagtagaatccccgtggacagctgagccgctatcgttgtttatcgcgggacactgagcaaacatgccaagccttgcaaactcggaaaaaaagtttcgataacgcttttttattatcgccgactccagcgaagaagaaccaattcgacctccacactcacttcacaattcacaatgggtaaacttttgcagaagaagaaggcccgctccgggcgctccatggcccgggccaaggacagccgtctcaagagcggccacaagaagatcaatgtgctgggaaatcagatcatcgccgacaactggtatgcacattttgctcaacttgaaaaatacaaaagctaacaactgtagggatcgtggtctgaccctgacacaaaattaccagcgccttggtttgatgcacaagctgaacgcaccatctggtggccgcgaacgccttcccggaaacgaggaccaataccccgagaacaagaactcgctgcacatccgcggcagcgccaaagcagccgcagccaagctcgacctcggcgagacacgagtcgagcgcgatcccgagaccggcaagattctgcgtgtcatccacgacgacgaagacaacatccaagtggcgggcctcctgcgctcgcgcaacaaccctctcaacgaccctctgaacgacatattgggaagcaagggcgagagcaatcctctcgcagactcggtgattgtgcaacaactcgagcgccaggccgatcaggagggcaagactgtccgtgctaagaagccgcggtaccaaagctcgcgcgagggcgagtgggctcagcgcttgattgagaagcacggggataattacactgctatgactcgtgaccgcaaactgaaccctatgcagcagagcgagggtgatttgcggaggagacttaacaagtggaagaagagtcagtcgtaatgccttcatttgttcagagcatctggttagggcgagtctggcgtttatatttttttgtttatcaaaagtgtctacgtggatgcaatgcgtcccgaagtaaatattattggacggcgactgagccgcttggattcgttatactgttcctttagttgttactgctgagcgtcgagtaggtgacacccccggccggcgggaggcttattcgttgcaccactcgtacccatcgtcggcgtctccattctcccactccgtaggatgcagtcccttcctcccaatcccgttgcgtcttctcctgctccttgcccttggtttccttgggagatggtgggtcatgtaggtctccgtaggctgacgtcaaatcgtcccctggttcttgccgaggcgggggcaagtcccaaacccaaccaccgacttctccgacaatggcattgccttccgcattcacgcctgggacctcgaatccaacactagtgatcatgcgctccaagacccattcacggcagtctaggtcgagttcccacttcttgctcttccaagcccagccacgcggggcacggacatcctcaaagaatcggcatccacgagggcggtccccggcaatgcgagatggtgatagcgggtcgtatggcgcgtggctgaagaggaagctctcccacccagactctgacgttcctgcggcccggtgctgcagctcaaaaatttccacctcccgctcctcgggatatgtgtccaaggagatatctgcgagtttttccatagccgacatcactgcggatgggtttgtagagaccgatgagccgaacccatcattcttgtccgattctttgtctgaggaatttccattcatatcttgcatcaaactccagaggaagtgtcccaccgttgggtggatggaaagaaccagtgcattgccgcaaagaagcagcacaagcttaaggggcagcagatgcgcactgatgaacaatactactatagcaattgtgcatccgagaaatagagttgaagagagcttctcgttggagaaattcgtcagcggcgcaaagacagagagggcagcatcgtgggcgtctgagaaatcagccatgcaattctgtagatcccgcatgttccgaaggaagtctttggaagtctctggtgctggcttaatagtcgtggctggtgccagcgctggcccatcataggagtagtaaggagtagtgatggacgtcgaggtgcttggaggtggtggatgacgagtcgcaaaggacggcaccattataaacagtaagataatcactagaggcaaaacgaaaaggagatggggttctaagcagaggaaagagtagacaaaaaggaaggagattgtatgacttggtgtgtcccaggtgaatagttgctcaacacggctctggaacagaaataccacaccgattctatagtagttttagcctcggtaggatatcacatgggacgattcgattctaccttgcattgaaacggcggaaattgtttgccattacaggcaaactaaaagccggtttctgaggagaggcaaagaccttgtctcccgctgaatcattttcatcctcatcgtccgttgggatgacttgttggagaagcctgcgatcgtcagctggaacacggatctatcggatttacccaggagcaaacccattccaaacatactttgtaaataggcggtcttgcagtgagttcttggatagagaggaagacctcgaatgcgagctatctggcgaacccggtctattccgttttgtgggcttgggcatgtcgctcagtgcttctgtaaatccatccatgactagacatgggattctacaggaagaagagaggaggtgaaaagggaagagaagtagttagtcctccgtactccgtagagagtcggcaattatacgatcagccccaagcacatgctttgccgggaaagaggctgacataatcccgtgtgtatcaggggaacctcgaggtacgatagttcacgaagaagaacaagttggtctcattgattctttcttgtacttgattttttttcagatatacatgtgttttatatgtgattcttcacatcccacttcgatttcatccaaaattctctttgtggaccaggtgccctataaaatccaccttcccccccaactttttccctctagttaccgccctagtggacttgccccagcaaccctgcttccccccaaaattatttatcaaagagaacctcctggcccttattgctctttcacaactcgcaatggaacggtaactgttttcaagagtcgcgcgacggtgctcaagtatctcctggttgagacctcgcacttctcctgaatgcaattgcgatcgcctctctggcacggtccagtctccttttccgactttacttgagagacgcgggagcttaaacaatgccaacaaagccgcaaacactggggaggggtcaagtacggaccgaagcacaatcacacaatccctcacatgatgattcgggctccggaggtaagagttgagatgtcgggaaggtgcagctagatactaacaagaaatagcagaggctccggcccgcaggctcctgcagaagtcggcttccacgcacttcccctcgaatacccattttgacacatcgaatggggtcgctggtccgcgcacgggtgggataaataggagaagactgtcaattcgtgatagggttcctcagggcccacggccacaagatagttcccgatggaggtatgtctagttctgctctcgtaattgactcctgaactaatttgatatctagcaaacctagtccataccttcattctaatacctcgtctgtcgattcgacgatggattcgaccaaaagcttcaaccttcgatctacgagcgtgggcaacctggcaaaggctgattccaatcatgcagacaacatggacttactagcgccggtcaactttgatgatttccataacagcatcatgggtgagcctagcctgaacaactttcccatgcccgcgagcagttcgggtgagaatcgtgaaacaggtcctccggcaaacccctgggaaagccacacgtacgcggccaacgtatcggaacgtgcacggggtgcttccgctcgacgaaagagtgaggtgcaacgtccgaatggtccgaatgctgcggcagggctcacggcgtcctcggccaacacccgcgcccgccgccagagtatagcccagccgtctgccggagctgctccaaggggtccgcgcaaatctatcagctctggggcatttgcgcctaccaatgcttcggccagacgcgccagcctaagtgcccgcaaaatcagtaccgataccgcggcggcaaataatcaccttcgccctcgacttccagagtctgatgctagagctgctcgaaacctcaaggcaaagtcattccagcccggcccaagggaacctcgtggtccgtttctcactccctctgggaacattgaccacacacgatcaaattccaccaatgctgtgcggagcccggtaagaaactcttctgccgccgtagcgactccttcctctgcctctaagcgggcttctgttatgccgccacatgccactggacttggtgctcgaacgatcagtcccactgacgcacgacgattgaagcgaatgtcgattgcgcctcctgctcctccaatgccaaatacgcctcccacccagacagaacctcttcccatctgccctatatcatccactcaatctccctctcaaattccgaggaaaagcgtcacaccttcctcgaaccgaaccacgcctgacccaaatcgaaagtcgtacagttcggggctgtctgcttcttcaagcaccagctataactcagtgcgaccttctgcgggctctcttcaaaaccggctgtcccaaaatctatcttcctctcgacttccgactcccaagccacgcacagaaggaaatcccaacggggaagaggtaccaccggttccagcgatccctaaggcctacgagtcgcccaaaagtgaaatggatgcacctgtcttccccacgcctaggaaatcaagtattcctgtggatttgaacattttgaaagattcagactccgaagtgcattccatagcccaagtcgacaaggttgaccctgtagaagcgaaaacccctgattcacgaacacgaactactaatattgtgggaggacgaaagggtttgcagcccttgaaattgcccccgctgaacttattgcctctgggcacacccatggcagccaaaatcgaggcactcaaggacagggacgaggagcacagagctcacaccccctccaaacaagtgatttcaaagacgcccagtactccgatgacagcatccaaggcgaatttctggtaccgtgatgaagacgaccaactgcccctcactcaggcacgaagcagcacctctcactttgccgtcagctcaaccgcgtttcgagcttctagcagtaccagcgcgtttgagtcatttgacacgccaagcgcagctcggaacatttctccttatgcctcatacacgctgcctaagagcggtgctgagctcaaccatctccgccaacagatcagcgccgactactcgaatcgaacgcaagcacacaagttgaatggtccacgacctcaaactcaaactgccattatcactcctgccccggaacggctcagccagatatcgacaccttcggagcctgagagtgtaactgtcgctgcgtccagcacctctcttcgagaccggcttaaggtggcacggcttcgcagcaactcgaagccccacaagccagaattcgatgctgatccagccaagtacaatgctatgccgccgcccaaacttccagcctctgcaacatggagtaacctttcttctgtcaactcgacgagccctaatcccaagccatcatatctcactcttcgccgccagtcttctatctcaaataccacaaatgcgacgactcggaaaccaagtgtcagcagcgagaaaagtctcgccttggagccaactccttccaatgagtcggttgaaagcgaccgctctagacgtgtgcagagctcgtacatctctcctgttcataagatgatcaatcatgctagatctagtgttgccgctgccccccggtctaccgacagcactgttgatccagatgtgattattgcagatgaagagatgaagcgacttggggccaaacgcaaagactttgaaaaggcggcgcgggtgctagacgacttgcggcgcaaggctggaccaaaggatcgtgtcagtcccgcccaggccttgaagatggccgcgctcaacatctttgaacgcggtgagatcattgattatcgcgatatttacttctgcggtactcagaccgccaagaaacatgttggagatcttcactccagtgcagcgaacttcggttacgatgatgaccgtggtgattataacatcgtcgtcggcgaccatctggcttaccggtacgaagttgttgatgtcctgggtaaaggtagttttggccaggttgtgcgatgcgttgatcacaagactggagctctggttgcgattaaaatcatccgcaacaagaagcgattccaccaacaagccctgattgaggtcaacctcctacagaaactgaaggaatgggatcctcatgggaagcatagcgtggtcaacttcacccaaagcttctatttccgtggtcatctatgtatctcgaccgaactccttggcatgaatctttatgaattcatcaaggcccatgaattccggggcttctcgttgaagctgatccgtgttttcaccaaacagatgctgagcagtcttgtgctgttgcacgcgaagaaggtcattcactgtgacttgaagcctgaaaacatccttctcgttcacccattgaactctgaaattcgagtcatcgactttggttcgagttgctttgagaatgaaaaggtctatacttatatccaaagtcgcttctaccgttcgcccgaggtcatcctcggaatgtcgtatggcatgccgatagacatgtggagtttaggttgcattttggctgagctcttcactggctatcccattttcccaggcgagaatgagcaagaacagcttgcttgcatcatggaggtctttggtcctccggaaaagcatctcattgagaagagctcacgcaagaagttgttctttgattccctcggcaagccgcgtttgacagtttcatccaaaggccgccgacgtcgtccaagttccaaggagctccgacaggccttgaaatgtgatgatgaagccttccttgacttcatcactcgctgcctccgctgggatcctgctcgtcgactctcgccccatgacgcattgaaacacgaattcctcactggtgtcaaggcgccccggcccaggatgtatgcatcaaactcgccccccaagcgaggtgtcacgtccgggcctcgtcctctcccagatcctccaggcacaactctgaagagcgggttcatgcgtacccgcgatgcttcggccaattccccggtcaagtctagcggcaagcgacactcgaccgtgaatggcattccgtccagccccggcaagcgagggtccagcaactctactgtcgggtccgcgctcccccgcgtttcggcgcggaatatcagcgggaagcccgacctcgctactgcggcggctgcgaccagcctggtgagttaggccagcaacctgaaccggggccagagatgggatgctgaccagccgctagaggaaatgatcttgcacgtttttttttctgaatgcgctgtaatactaatccttgtttttacgttctcatccttgcatcgggtggttgtcatgttagcattttgttccttgagatgcattcatgttatacccccttgttcctgcatttgcattgcgcctctgatgacctgagtgttcgcttataccttatgttttgctcttgcttatgcatttccttcgtttttgttatacttgatgaaccccattagggccatgtgtggtcccttgtacattgttacctcttattgcatttcttaagagtttatgtgttgctcatgggtagagcgatttaacgttgtcaagtggcgtctatgctgaattaatgaccatgtgatttttagttttacaacttctataaataagagactgaataataaagacacgttaaagacacgatatagaatgcacgttgttgtactggcattatccccactgggcaatcgggctacttggcctcatcgccttatcttagttactccacttctacaacaactttggcctttatgggtaattgattcgcaatgaatggcttcgaatctaagggcctggacgaagattccttcggcggcaagcctggtctgactgccctgaagaccttcgacgcctttcgtgagtaccctcgagattcaagctaaacaaaagctaaccgacctccaccagccaaaaccaaagcctcctacacaaccccaacacgcagcggcggccaatggaccgtcctgatcctcataatatgcacgatcttcagctggtccgagttaaaaacctggtggcgcggcaccgaaaactaccacttcagcgttgaaaagggcgtctcacatgagctccagctcaacctcgacatagtcgtgcacatgccctgcgaccagctccgcgtcaacatccaagacgcagccggcgaccgcatcctagctggcgagctcctcaaacgcgacgacacaaactggctcctgtggatgcaaaagcgcaacaccgagaccaacgccggcgcccacgaataccagaccctctcccacgaagaatcagaccgtctcgccgagcaagaagccgacgcccatgtcggccacgtcctcggcgaagtgcgccataacccgcgccgcaagttcgccaagggcccgcgtatgcgccgcggtgtcctcccggactcttgtcgcatctacggcagcctcgagggaaacaaggtgcagggcgacttccatatcacggctcgtggacatgggtatcgcgagaacgcgccgcatctagatcactcgtgtatgtgttttactttgtcacaacccatctacagcatcgctaacagctatcagcattcaacttctcccacatgatcaccgagctctccttcggcccgcattacccgaccctgcagaatcccctcgataagaccatcgccgagagcgaggagcactactacaagttccagtacttcctctcgatcgtgccgacgctgtacagtcgcgggaagggcgcgctggacgcgtacacgcactcgccgcagacggcggccgcgcggcacggacgcaacacggttttcacgaaccagtacgccgcgacgagtcagtctaccgtgctccctgagtcgccgatggttgtgccggggatcttcttcaagtatagcattgagccgatcctgttgctggtcagcgaggagagggccgggttcttgtcgctggtggtgagggttattaacaccatttctggtgtgctggttactggtggctggctttatcagatttctagttgggctagggaggtctggggtcggaggaagaataggtcgtcggaggggtatttgacgggcaagtcttctatggattgaggttattttggttgtttcacttcgaatgttttccttgtcttattatatcgtgttccatcatatatcctacgtcaattgcatcaggagttcactctttgcatcgaagttcattggtcaactcggaagtcgagttcgacctggtatataagtagtaattgatcgtacatcccgcatacatgatgcatgcaaactaaacctcaaatatctcccccatgcctacgccagcaccctctgcaccggcacggctatcgaccagatccagacgccagccgttccagtcacgcagcttgctcttgatatcgcgcatccattcaacacgcttccgggcttcctcctcggccagcgcacgcgcgaatgcatcttcatcgaactcgtcatcgaggttttcttcggaaacaagctcgagactaccacgggtaccagggggatgaggggatgaagtttgagcgcggtttccaccaactcccgtaaaggcagcaaagccgctagaaagtactgtggagaaggacgagtgctgctgctgctgggccatgctgcggcgacgcgcatggtcgggtcgtccaccgacgagatcgacgtcgtcgaatgcattggctgcgtcaccggagacagcgctaggtccatcatccgggtagtactccatctcctggcgcttctcttgccagacgccgcggcgcagatcgaagacctcgccttccagctcgcggattcgccgctcaagacgctggcgttcttcgtcctcgagctcgtccagggcttcatcgtctgcgcctccactggtctggcgagttcgaatccgatcactctcttcgcgtagacgcaggttctcgttttcgatgctagcgatctttttccgcatgacagcgatttctttgtcggatttctcgctctcgcgtagccgtgtttggtgccgggcttcggtttctttgtgaaggttgcctattgcctggagtttcttgtcgagcgtctcgattttcttttcagattcgctcttttcgttcttatactcctcaatctcacgctggaggttcttgaccagagtttcggtggatgtcttgtcaacgccttccttgactgctttctcggaggcccgcgtcaatgcctgcttggtgtctgccagttcacgctgggattgatctagtgctgattgtgtctttgaaactttctcctctagcgctgcgacctgagactcatgtgcatcgttagaggacgtttgggaggcgacctgggcgcggagatttgatatctccaactccatagattcaatagtggctgacttggactcgagctgaagaacaaggtcggctggcggtgactcggttgtagttgtgtttcgatgtgaccgggtctggagctgtgagttctgtcgctgaagagaagaaatctcctccttctatttcgcaggttagcaaatatggctaccacggaaaatacgatatcataccaacgactcaatgcttgcaaccttctcctctgcgtttttcaattgttccctcaacccgacggaatcaacactcgcatcccgcagatcctccacttgctcctcagtcttgcgccagcgcagagttgcttccgagagatccttctccaggcgtttattttccttctcaagctcctcaatcttagtagactgtttgcggaacacttcgtgaaccgactccccgtccccggttagaggcggtaatgactgtgaaggggacttgagcgtagcagaagatggagagggggagacgcttccatgtgagacggaggtcttgcggaatgaagacgagcgcatcttagactggattgacagtgaggcatgtcggccgtggttgccgcgcggtgtatcgagccggactggcagcggctcggcgtctggaccaggagatgtgggcgctggaggcatcggttcagtaggagactcgatgtttgtatcaacggcaagttgcgactttggttcttctaattcctctgcttgttcggaggccgtggcctcgggttgcgcgaccggctcatctttctcctccgcgggggtgtctgcctgctgtgtttctgggctcggggcatcttcagcaggttctgtctctgcggagacctctgcgtccttgggtgtgtcggctccggtggtagtcttcttggccttctttttcttttggagctgggcaacctagagaacaacagtcaagttagcgaccaaaacaacgccatctgtcactcgcggggaattacccttttcttggctgcggccagcttctcggctttgatgcgctccgcgtcgtcggccatgatgaatcttatgaattgtatgagtttattcaaatggaagttgatgagtggaagggagagaatggacagctctccaatgcacggaccacgtgtctgatctatatgcccaaatgagacgtgcaggtacgaactagaggtcgatgcgctagatgattacatagagccactctactattatttctgactggacattagaaggtgagatcaaaaatacaagcctacatagcaatatctaacaaatcctacttccccagctccatactaaccggcaggtatatatatatatagagactcagagcgagtgagtgattttctggtttttctaggttgggttatttcagacaattatccacgaggagttggtaagggtattgatcagagattcagagtcaatacagcttgtttacttgacaagaacgatgtgataggggaaacggccccagagagttgaagcgtggaagagccatttaatgccttttgccatgcgttatggaggaactctgtcaccggaggaccgtcatgtcatctcttgaggttgatcgagatatggtgtggaattacgtatgtcctggtcgtggtggtcaacaaacctaacaacgggcctcctcccgtatttccattgggcgttgcaattaatccacctgtcgccagcgaagcgaggaggggtctggacgcccttagtcttgctcctttggaacaactgacccgagaagagtctgtagggttgacataggatggtgtgatccctgggcttcggtgctggtcatggcatatggatgactgtttactgtcagtgacagcttccaaacgaatatcaggagtcaaaagcaacaaaaaggcttacttcctaacattgataaatctgcataagacagcacaaatccaaaaatagacatagtgatattagagagtaagtcacagaaagttgaggggcagtatgttaataccctctcgtgaacaagaaaccatgcaaggaatcgcgccattcaaacaaagaaagaaacatttacccaacaccgccagctagaaatatcatacccgatcaacggggccataagaagataaacaagaaacgaacaaaagcaaaagcataaagccaagtcattgatatatctagacctccatcgagtccgcaatttcttcactcatcgcgcggactccccgacggttggttggcatattctcctcgtcgtcactgatcacataagtgtcgtagtcatcggtcgtccgaatcgtcttcggagggcggtccatctcatcatcactgtcgctggagataaggttcgatctagcgcgttctccaaaccaaaacttggcacgcttgctagagctgagatccggtgtgaggtatccgtcgtcgtaggtccgcttcccggtaggcgtagtcgccatctcgtctggggtgtggctgagtataggaatcgcgcgtaggaagatgtaacaaacgcgcttgcgaatcgggttgaagaagaagaaatgtagactccagatagctccgtcatcggcatcggaagggtcctcctccggtgaatatgagtagatcgaacactccttgagcgacatgtgttcatctatcgttttccacacccgtgggccccaggcagaagatgatcctgctgtgtatgatccagaaagcgtcgcaggggatgccggtgataagttgatgttctcgcgcggtcgcaggttgagcagcgttgagtcgaccgtgttcatgacgcgtttcaaattccgttcgcgtcggaaatcagtggggcgtaggacgtgtgagaagtcataatccgggtgacttgcgttcagagtagcgatcagataggcaaaggtccgtcgactcgaatggtcgctcaggggtccgaacgggctggaacgcgatagattgagggcctcggcggcatcgtgtgcattaggaggtgaaagtgaagccgaaaaacgaaggaccgattcatattgagcctcgagcgactgttcgatatggttgtagagtttccgatcagagcgtgccgccttggtggtgtaaatatcacagccgccgacgatatggcagtcggtcgtatcgaaatttagagagctcgtcacgtcctcgaagtctggaagtgggaggaactatatcatgagagagtgagtaaactgagagaaagacacgttgggttgcgaccgtgaggcataccttcatcgtgaggttgaaccggggtgtgtatccagataagccgataaggagcttgaaatgacctgtcacagtctgctgttcgaaaagaatgactcaggtctctcttctaaggtctgagagagagataagacgagggaaagtggtgttaccgcaacgggtgattgaaccgaaggtggatatccgatgatgtagatgggcgataacggcaaagagggttgggataagggggacacgaactacactgggcagatcgccagtcttatagcaagtcaacgccaatgtcaaatgaggagtatacaaagagatgatgaagcaagaggggatgggcctatccggggatgatctgagaggggagggattccgaaaacagtcacgtgtgggcaggcgtggcccagtaggaacccgcactgacctcacgagcagtccaaccatggaaagggcaacttcataggccaacaggcccattcaggctaattcacagcccaatctcgtccaaattgcgtgttatgtcttccgaagcctgggggaaacgagttgtattgattagtatggtgaatgtgaaaaactcctatgtacgcccgcaaataaaaaaggagcaagaatcctgcttgctgcgttacatgatcttggtgaccacatcttcctcaacctggggaataattagcccggctgaaacttggccatggctggacaaaggggggggggggataaagagcnnnnnnnnnnnnnnnnnnnnnnnnnnnnnnnnnnnnnnnnnnnnnnnnnnnnnnnnnnnnnnnnnnnnnnnnnnnnnnnnnnnnnnnnnnnnnnnnnnnnnnnnnnnnnnnnnnnnnnnnnnnnnnnnnnnnnnnnnnngtcgggagcagaagggggggggggggggagataaagagcccaaatatagccagcagcaccgttcttggttcttttcgttgaaagtgccaaacaatacccatgaatggaaataaaaagacatcttaactcacctccatatcttccaaactgtcctgctggctgatacagcgaagaacattcttcttgctggtctcctgcatctcccctgcaatcaataactcatcgaggataaagtatgctttctggaagttgaagatgatgtccagctcgcagacattgccgtagtacttgtccatctgctcgacgtagcggtgcaccacctcgagggtgatcagctcattatcggtcgaggcacagccagcgatgaagaagagcgaagcgtagcgacggtagacgactttcgagtctagtgatggagtccatgttagtccaattccagcttgtcggcgatagggggtaggggtcgggtcgggggtagccacctttgtattccaggaaattgcacatccgcgtccggcgggacagcaccagctgggttacatctttgatgatcttggccttttccttgggggagagagtggtgaaccatttggcgaggcgctagggaaacgttgttagttggggcggcttcggccaggtgttaagtagttgggtcggtgacgaggcataccactttgccctgtcgggagagcagaatcaggtagctaatggcgggtcagcggtcgcaaattgaagctgactgaaggacggtctcactggataggcatattggtggcgttgtgaaatgaagggatggagaaaagtgtcggggcggaagctctggagaaattctttgggtggagcggaggggagttttgccccgctaagccctagcttagcaatttaaacgtgaagattcaatagttcgattcaagatggatagttgtttctgctagaagtcctaatatgctttgtgcgtgtcttgcgcgcggaccttgaatgagtcaacccttgcctgccggagtttctggaaccatcagcttagcaaagctagtatcagagcctcatgtacggatttggagtaaaatagaactgcataatatacggtcgggctattgttatttgtttatatgtgtgcatgctatgcgacctatgtatgttcgcaggtgatctataaaaattgtggatgcaacatacggagaagatgagctcaaaccataactataaggatgtcagagatccatgacttggagaattaagtaaatatttacaactaaataaccagagatgtcaaactatacggacatacggcactgaaagccacgtctaagatcataaagtaaaataagagtcaacgccaggtaaacccttagacgatgaaaaacaaataattattaatgaaataagtagtagcacattaagtatcagaacatccctctcatgatcgagcagagactagagaggcagcgtttccgtcgaatcgttgcaggcatgagagcatgagcatggaagacataaaaccaagaccgagagccctaagctcgtcaaccacctcaaacatataccgatatcgctcaactcacgccattaagcagaaccagaaccatacctatagccatgatccagtatcaattaccaggtagatagattaccgcgacaaggcgagcgatagcaactaagcctcaggccgagtgtaaaccacgcccgctttccatgacaaacgacccatttaaacctgggtcatgttggggcgggcaccaccgcgacggctagtacggcgcgagggaccagcagaggaacgggccatgaaggcggagacaatgacggaggccatgtagccggcccaggcgaaccagaggaaagcaacggaggcctgggcttcacggcaacgcttggtcatgttgtgtgagccattggtgatctcattgttgataaggtactcctagagggagttagcgttcgctctcatgtcttatatttgcaatccattcaagtcaacttacgtggttggtgcaagagtggcactctagcttcgccgcgagcgcgatggcagcgcagaagaagaagatgcagttcagggcgtcgatgatgatcatgatgagggggtggccggaccagtcgatgttgaacgaggctgggaccaggtagaacaacgtgaacatcgagaagaccgatgtatagatggagtagtttacggtcgctgggttgccggcgaaagcttcagcgatcatgttaccgacgagggccatgacgagcagggagaatacaaactgtaatgggtcagtactatattcaacttgggattcttatagcttcaagctttaagcttctagctgtcgcattgcaattgcactcacctcccaggctctgagaccgagctgcacacctctgagacccattttgtagatttagattaggtcgaggttgatttagatccgattgtcgcgttagatcgcgaggaggcaggctggttggaggggtataggatggcgaagtcgagtaaagaataagcctataggtcgattcagcagtatataaaagctctgggaaaacgtcgacgttatgaatcggatgttccggagctcagtgatgacatggaaaagcaacatcttcaaaaccttaaaggtggcgatacgtcatgcatccggcatacagcggcctcattggactcggttgcatgtacagtggtgggatgtcggagatgaaatcatgagtggttgcactctggtcgatgatgagttctcgactagctcaggatttccttgaatgaggcctccattgctgttctttgatccacttgggtttttttttctcacaccagttttgaagattctgctggaagagacggggggattcaggttccatttccagtttgtgggtttcccctcattgacagttacaggcttggcatttctaggaacggcgctgttggacgatgtcgatctttacgattagtggctcgataaggctgagatgattgaattctacgattgaattctaattcgaacaaaaagactgaagattctattcaaataaaaagtaaaagagaaaccataaccctccttggcgttattagcaccacactaaccaagagagttatggaacccttattggtagtttattttactttgacctatataaaagagagagaacacagtgaatctttcaattcgatgccatatctatgttgtacacgctatgaccttacatctttatccgacacaatccccgctaaactactgtctactaccctatatacttttatatagatcttatttaataatttagaatttggtagttcgtcttggtaaaaaacccactttctatgtctccgtgagagtcttcttatagctgctcaatcaacaataaagcttgcttcaatttcccagcgacaacagagtgtccgtttcgtgttgctgctttgattgccgtttccatcatctctccgggtgcaggggcgtcgaaattcacctgatctgtgagtagcacgttcaccatttcaaagtggccacgctccgctgctgcctgcaatgctcttcctctgtcgtatccggacgcaggcaccgcgacttcggcccgggctgcgaggagcctctccccaattttccagtagccgcctatgactgctaattggaaagctcttgccccccagacttcccaggacacacttctcttaacatttgcccgagcttcgagtagtcgttccactatttccaagtgaccaccctccactgctacctcaagagccgaggatattgtttcttgatatccaaaatccgccccagctgcgagtggtttctttactgtttccaagtgaccgtgtgccgctgctccttggagtgctgtttctccgatcatcctatgtgcaggaatatgatgaaccgcctgggctgctaacagtcgctctaatattttcaaatggcctctctttgcagcggctagaagtgctatgcctcccttgtcatgtgtcccaaatgagttgatttcctcggccgccataagcaaccgctcgacaatcttcagatggccaccagctgctgctaaatgtagacatgttttgccgcgtgaagaaatcggtctagcaaaatcggctttctcgctcagtaatcgctccacaattttgagatggccgccacctgctgcagcttctagcaccgaacagtcgtcaagaatagtattcacgtcggctccagctcgaattgaaagattcaatgaaaagatgcaacctgattgagcagcaaaaaacaccccatatttcaagacctcaagggaacttcctcttgcaacgatcaagtgcgtaaagcgaaagcgatatttcataggggagcccttcaagatttcacacatcgcttcctctgtgagactgtgaggttgacgttgcataatgtagaccaacagcgtaagatgcccggaactaatcattgcctgaactgaggttgaattgtggctttgttctttttggtcccgctgcatgggctcccatggtttttgtgccgatatatcatcgtcttccatgcatcggcagaagagcttccatatcttctggtgcactacaggatttatgagcgttgtgtggtagatccaatttgtctcggcatattcatggaactggaattcattgtgttgtaccgggatctgaccgggggatttgaactcattgcgaagcgcttcaattttgttttcaagttctcgagcactaatgccctgcagctgatgacgacgagacagcagtttcagtgctatttggttggtcgcaccattatgactatgtatgcgcgagagaccaagctgaatcgggtttagtcgagtattggagcttttgtcggctctcgtcaactgacgcttgaagtcggaaaaatccaggtaggtcatgcagagaaacccgagatgtcgatcgagtttttctacgtcgaattctcttaagtgtgcgctgttggtggtaaacaggtattgcttgacactttggtgaacgtaatggacagtgtcttcttcttcgtcaatatacaccaagccgcaacagtcgctgaaaacgtgattcatatcgctggggaatttcccatgttcgatggactcttgtccgggagaaagactcagcgcttctcgatactccatgacagtcaaaggttttttgaagacaccgcagtattgcaacaccttgatcgcgttgttattagtctgtcgatcgtaaatccgagatatcctgcgatcaaatatttccaacaagccacgtggaagattgttgagggcatttatgatgtcgttgtcgcaactttgggcgcagaggtcttcgatgaacaaacgagtccagagaaacctgtttaattttcctgtgagcaatggcatatgttatcatttgtggagggcggcgaaaacaatatatatcaaaaaaaactgtttgtggccgtaatctatggaaaatttcaaggggaactaaagaagaaattggaaattggaattgaatgcttcatcacttacatgccattggatccctcccgtaatgccgtggagatcctgattattagaccaggatcccctaatttcagatcttcttcctcgagacagcgaccgagggtagtcgaaatatagtgatctatgtcccgctcgacgtttacacccgtgattgggatagtgaagtcaggtctgaaaaccccgaaaagcttctcttcaagctcgtaccgaccggcgcagatcagcttgaatcttttctcacggcttttacataaccgagctagttctgatgacacctttttgatctcggcgctatcaaattcatccaacccgtcgagaatcaagaaatactgcttcttaccctcaaggtatgaaagaagcaagtcgataacatcttctgtgtccagacagccgctggtatcctcgagctctcggagcttggcattgtcttcaagatcaatttgcgaatctagcaattgacgggcgattgttccaaacaggcttctggccgatagggatgccgtttcctcggcacagcagatgttgtatgagataacatcattgggctcccgtgatctgtatagatatgccactatattggacataagtgtcgtctttcccacacccattttacctgggcaccagagaacggcactatcttgagaatccttccaccgaaagaaggtggtttcctgttgaagccactctgccgtagaagaaacgcgctgccttaaagcctgcttccatggcttcacaaaattgatggttgagagattatctttgatggtggatctcaatttcgagttttctcttttcaacttgttcaggcgccatccgttggcttgtgtgtactccttctgactttgctcatggaagttcaatgcgcgccggcggaagtacctgttcctttgggtttcataatgcagaaggttcctcatttcctcgatcgcctggttcgcggctaatgtaatctctagacgcacatgttttgcggcttgctcgagctgaattaggagtgattggaactcgaattcgaaaggattgaaaatagacgataagatctgggaaaatggagcccgccgcgatatctccattgttctaatgcaaattcgaacaatgatagcataataattgcacaactcgcgctggagaccggtgcatccggggtagagctgaccaaattcctggtattttggacaagacttgccaattgccatgatcatgcttgtaagcttgtcaaaataggacgagatattgcttgctgacaggatagccacttttaaacctccccaaatcagaccggcgatttgaggattagagctgacaaatgtgtccacgatggtagtgaacttctgcgtcgattcgagaaaattatacagctttactgcaacgcttctctttgtcttagtactgttattggcatcaatctccgccacgaatgtaacaacactagaaatgtctggactttggttgctcatatgaaactcttgcttttgctccttcgtgaggacactctcaaatgcctccaacgcttgtgtaagagctgccgtgggatctggtgttccgggatggcgggagagaggcacaagttcagccatgtcgggcaatgagccttatttgggctatctcaaacgttcaaatacttgatcgcttggagatacgcagtatatcctcgtatggtatgggcggacgtgatagagattaaaagaatcaaggagttgggagttattcagcggcctagcattcggcatggggaagcgatagattcgatttggtaacctgcaaatataaggcaggtcaaaaagtcaggggtggctaacgtcgtcagtatcggtgagaggcagcaggcagaaggacacctgattggcccctatgcgcgcctgcagatgcaacaaaattcacagcctcaaagctggctccaatgttcaaccaatcatctcgttgagacttgccattgacgtggcagtgcacaagagtaagcagtttgaatatttggtcgatgagctagctctccataccattaatagatgctgtcaacaaaagagagtcaccatctagtagtgcgtagtgcgcccgagggatattcagcaccattatctgcctaatgatcgatcgtaaggctcccaactatcttacttagcttaacctccatttattctgcgcgttctatagtaccatgggggtcactaagaaatacccggcctgtaaaaataattgacgagaaggtgtggaacaacatttttgaagacggcgtcttcggcgccgggccttcgctattcgctgtagtcggggatgccgtgaagccgtccgtgagacgggtagcttgcctataaggcggacgaagcccttgactaccttcttcagctgacgcttcgtctcaagggcccgtctagagaatcaagaagtcccgtgtttgatgcccttggtaggtgtggttcgtggtactggcttgtgaagaacccaatgcgtgcagaagcaatggctcgaagatgtcttgatgcggattggaatgattatgtctgtggcgtagctggtacgcagttcgaatgagctgccgagtcttgtaagttgttggtcaactttaacagatagttttctttcctttccctgtacttagtatcttggtaatatgcactcgttctcctgaactgaattaatggtatatcacttcctctcagactcactttcaactcacctaaatatatgttcaatctaggtagaaattaggtaaacaaacatggatgttaaagttattagtcaacgcgcgagcctggctgattgcagtggtataaatacccttccatccttaggcttgatcatccttcctcttctcattcacatctcaggatcaagcttcctggggcttactacaagaaatacgttgtctataggcttcctagccagaccagctcaatcttcttttcatttatatccccaggagatgggagaccctagcaagcccaatacctggataaaggacgttcatgatctgccaaacaccgttagtcttgttgggatcatttacgtcctatacctcgtcgggcaggttgtggttaattctatgactcacttccagaagctgaaagatacttgcagagtaagtttaattgatatccctccctatattgagagcagttcgaaggatatcactcagacctgaatactaatagtcactataggaagacggcgaaatataccatggatcccgagagcatatgctacgggctggcatagctgaagtcgccgatatgcggtcattgaagaatacgagagcgaaatggctggatgcgagcaaggtaattactttgcactcgacgtcaaggtcatgccaatttatgagaaggaaaagaacattttcatggctttcctatatcaacccagtcacatggggttctttgctgcagctggtgattcgtcgtcgtctgcaccgagtttgtcaagtcccacttccgatggagcttcgctccgcgagttgacggacttacccaggtcattacggctatcggtcgaacctttgaacgctcatcggggtcacccgatgagctatcctttggagatgatggcgggccggatcgaagggcggaagtgagtgatgcagcagagacggtcaggcaagtccaattccttctgcggtatggtgattatgctggcatggtgtggaatgttctacgtcggatctcgcgactttccgacacgcctctgccagactttgtcgtctcattcgataccgacctcgacgttggtggagaagaccaggatgatggagcattgccaggcgggacccccgcaaactctgatgccactgttaatcgcgattgtacctatgtccggcccgatggaaagtccaatccaatggaggtgtgttgtcttggacgaatcaaagaaggagaatactatcggtaccttaaatggatcatatatgaaactgaaggtcagtattgcaaaagctagagttgagtattatattaatggtataataggacattgacaacaaaccattgacatccgtttcttacaaccgtcctcgccgacggtatttgtacttctgtttcgtacctgaatgcaaagagccgaggaaccagtgacgaaaaaggttaaagccacgcgttatcggccccccgccggcgagtagcaatcggtcaatactggttaaattagcccgttgttttaggatcggaactccgatatgtacgacactgcaagcactgggtgtggaatcgacggcgatcaatctacccaacaacagggaggagattcgaatcgacgagcctatggtaaggtcggcaatcaaggcgtccgcgttgcggaataagctctgccacagcagcaatcttcgaggtaccccccagacatcacagtgcagtacgatggagacctttagaatttagtggcactcgtcgagactcgttccttccctttcgaggtcgtgagtcattcccttccccaaatctccgaagctgactgtacggaccatcattgcgattggtcccggtccagcttcaaccccacaaccttattcctgaaccagacggaaccgaccaatcacgatggttccaccacgaaacgcagcgatcggcaagggtaaacccgcgacagtgctagatcgacatgaggaagaaccggttgatcccgaaacctcaaaccccactggtgtacaggccctcgttgaaagtatcgagcatgatgatgccggagaaggccctttcaatgttcgtgcgatcctcgacgcaactccgaatgatgattgaattctatattctaattgaaaagaatgaagcttctattccgattagagaataagaacaaaaaaagtaaacaaaccctcgactctgacgttattagcacactctaaccaactgagctatggaacccttaacctttgataaaatagtttcttctacttaatctatgtaaaaagatagagaacagactcaggtatagctttcagttctatatgccatacctatactgtatgcgctatagcaccttacaatctttatccgacacaattcggttgtctactatgggatttatattgttatgtcttttttggtgtcttttttggtatatcctatactgctatttggagccttttgatactactattatataacttttttatatagaaagaaagaagaaaaactggtccaatactatggagttaccatggagcatatgcttgtatatagtatctctcttaatgcgatatcacttcctcttactagactcactctaaacttacttcaactcatctaaatatatgtccaatctattcgctgaatatggaactacagaatcgataggataaccccgtctatattcgcactcaatgataatgtaatacggattactatacaatatagaaaccaagcaaacgaacatggatattcaagtcatcagtcaacgcgcgagcctggttgattgcggtggtataaatacccgtccaccctccacccctaggcttcttcggtcatcagctctcatcccttgatccttcatcctgtcattcgtaccttaggatcaagcatcttagggctcacacaaaaaatatgttgactataggcttcctagccagaccatctcagtcttcttttcatttacaccccaggaggcttgatccttcttcttctcattcgcatctcaggatcaagcctcctggggcgtaactgcaacagatctattttctgtggccagtattgggtctacttgaggcttcttagccggacatctcagtcctaattctactttcatatcggttgttacggcctgaaggatcgatgggtcgttcttgcctgtgtgggaagcaaacattccttcctactaagcgagcataagcgagtatatctgcatttgcattgtttgacacgagacgcacaaaaccatctcggctcctcgttggtcttttcttttattctcctttgattgttctttagaatgcactctttgttcaataaggtgcataacctcgcttatctcgtcgacactgtctgtgtctgagagtcaccaccattgtttgcccacaaaggttcctgacaaattctttctttcgctttcatcaccacccatcttccttttttattcaactcaaccatcgataccttcgtctattcgcatctatccttggaccagcgtggctgcgttttaatctttgttccaacctgactacacaccaaagggacaccgtccagatatcaagcggaaacaaacatcgctttctggaatgaccacaactatatggtcttggatatgtggccattgcaggacatgagaacgaaatggctggatgcgagcaaggcaattaatttgcagtcgacgtcaaggtcacgccaatttatgagagtgaaaacaacactttcatggctttcctgaatctaactcaacgcaacaaaccaattgtctttgcgcgcacagcatcgaaaatccaaaagtcacactcattgccttagaaaatctcgatcatttgaatggatagatcaagccagctattggcacgtttgttcgactctttcagatattgaatcgtctcgctcgctagcttatcttgattctagctagcagcacgaaagggccgagagatatttgaaagacgcggacagatgtgccaacaactggcttgttctatccgttcaaacgatcttggctttccagggcaatgagtgtgactttgtgattttcgatgcggcacgcgccaagacggttggctatagcaaacttccgacgctggcatattgcgctagcctctggattgtctaatctaaccatatgtcctaagaatcaatcccgttgcccaagtcccaagctacattcaggggacatgcaagtttgtgagttcgaagcagttgaaaaacgactctcaaaaaactagaaagtcagtcgtttccggatattcctcgggatacacgtgcttatcgtatgcccagttgcgtgctactcgactcgtcgggttctgcgcatggaaggaacggagcatggaccgcactttcatacagaaggaaccgttccctccatactggaacactcatttgcatggtttggcaagatcgcctacaaagctatgcaatcgggacgcaagtaacattactattcatgtgttaaatcttgctctttctactaccggtagtcagtctgctcctggtgagccttctcacgggtaggcgtcctaagttcggcactgctgcattgggtcagaagtgacaaaatcgacatgaccgatgaacctccattttctactgtatctctatctctagaattgaatcaacttgtctaccatatacatactctaagtgcagttatttgatacacaagtatatgccccatggcaactctaactaatgaaggttatgccgatggcatagcatacttagtcgcccgtctacgtagcattattccaaccttggaagtgtttccattgcaatagataagactgcatacttgtatggataaaatcaaagttcaactccagcaactatgctcaaccaccaccagcccacaaccccaacccccactagctctccccaaaggcactttgcacagatccatacctagaaaagtcagtataattcataaatcaaatccacccacaaaactcacccttgaggacactggctacccaacgcaacactaccactacgcatgtagcagaccttagcctcctgacacgcggcagtagtgcacgtaggactcttaacactcttcttcccttggtaagtattatgcaaactaaccagctccacatccttctccatagcctcagtaacccgatgccagaaagtcgcattcaacggtgcgtcctcatcccacgcagctgcggatccgtacgcctcacgggtagaatattcaatctcaaatgtcggacccgtgtgctccagagccgggaattcagacacattgctgtagaaggtgtatgcctcgtagatgttaaagtcgcctgtatcgacttcgtagagacggaatccgctgttgaggtttgtcaggggtgttatgctaggcatgatccagccggtggtgagggcgttatcggcattctgcgcagtcccgttgttggcgtagtataccatgaactggtcttcgtgggtgtgtccgaagaagatgttggcgattacgtgtggcgagtagcggtctacgatctggtagaatagatcggttgggttggggagggggttggttccgtcccagccgctgaggacgtggccgattatccagacgcgctcgccggcgtcttcggctttttgtagttcttcgatcatccaggagaatacgcctgagttgtccgggttggtggtgttgatgaatgttaggaagttggttcggtaccagaagtctgggagagtgagcgggtgaatactaaatatgggatggcaacatacctgtgttgaatgcgagaatgcgcagtccgtagtgcgtcttcacggagtatccgccataatgcgttctcgcttcatcggcggtctcacggctaatccagccttcatggcgccacagtccagccaggtgctcatagttccagctttgttgttctcccagacggccagggaggttgtgaggagagtcgatatttgcaggactggtgtcgtgatttccaagtgccgcaaagacaggaccagagagatagtgcttgaacatatcgttaatactagtctctgtatactgggtcaatgccttggagatctgggatgccggatcatgcgataccaggtcgccagtataaagcgtccatgcaagatgctcgtcgtgttttcctttgccagttccagtcagaggaccaacagcttgcagagcagcaagacccaagtcatatggggtatcgcacatgaaagagccatacgaagaggcagaaagcagcgggctgccttcggaaaggtcgttggagttgtcgctcctacagcagaggctagacgtgcagtttgcttcagaactaacggcataccgggcatcgagatggaagtctgacagatgcagtaccttgacccgctcgccacttgccttgggaacctgggcatctgcaggcttgggcttggggaaaagcttggtcgtgtcaagcgggctggtagttggcgcactacaaaacttgctgctgagagaatggcagatgtattcaccatccaatccttctacatcggcgtatgccagcacctgcgtccagatagcaccaaaggtgtttgtggcgaaatcttgctcgcacgtctcattggcatggaaggcaaaagccttgcacaggctgaccatggcgttcgggacaaaggtcggggcatgcaatgctgcaggcttcgctgcggctagagcgttcttgcatttggtgcaattgtcttctgaactcgacttgatgatgttggtcacattggatagtgcttcttgaaacagcctatacctctttttggcagacatgtgagttcgcggcataggaaagtagacctcatcttgattgtctgggatgttgtcgggatcagtcaactcatagggaaaggtgaggtccaacacaggatcgtagataatcggctggggttgttgggttggctgggccggggaaacatagtaggatcttgcattcacattagcatatgtgcctaagctaccagactatcagtaatcatacgagaatacagaggtcggaaacccagcagcagccacataggacgcgtcaccagggagtgagacagcagcagcaaggttcaagatcagagatgtagtccccagcaaggccagggccatcttggatagacagtgcgccattactgcaggcgaatgaaatacagcagagaagaatgagagataagcaaagaggaaaagaggtatttacatatttacatacttatgtactgttgcgcaacataatcgcaggtccgatgcacgtggtggtctatacctatgggattcatccgtcgcctttcccgtggcgcagagatctacacggcattgcttgattcatcttagttcctggatgtggaattcctctgatttctcttttttgtacctaagccctcatgtagtatactagctagatgctaggcagtcgaagctttactatgttcaattgcaagtcaattgcatattgtacaaatattaaattggtttgagtctgaacacgctatttaggatctaaagtctgggtggatacggcagttttgggccgcgccaaccgtcgggttaaccagctgccatgaatctcaatgtttcttgttaatatatgggaatggattgctatgatacggggttaatataatcagatcctaataaaagactgattctctactatacaccgacaggagcggaattgaaggtaggatcggagcagcatcgtcggtctcaatgactttcgttatacagtatagctaccctctcccacgccttcgctgagtcaatccctcagggcgcttccgaaaaaattccctaggaatgaaatttccatcttcatcctgcgccgtcccatcgccctcatcatagacaggaatccacccatccggggcattcggacacagctcgcacatatgatcgaattggagattcaaatagagaggccacaacgcccagaccagcaccctcatatatccacaatcagaaggcgaatcatacctctttccggggtcataccgtccatcaacgaccccaacaaacccgtcgtcagggtcatcagtcgcaacaagcgagttcaacgatctctcatcaatcacaagacggacagcaaagcgagattcctcgcagtgttcttcctgcttaatctcacgcagatactgagcgaaatggccgcgaacttgctcgataccggcaccgtcccaacgactcgagtcggagatgatcacgtccttgtgggactcttctatcagatgctcggggcgagggtcatccccatagttcaattcaccctttatccatgtagtcatcacgcgggttagcttttccatggcgatcggccacaatttctcagactcgggcgtgtagactgttcgatagatgatatatccccaaggaaaatggcatgggaatcgttgggttaggaatcgatgggtaatgcgatctgccgtgtttctgtagcatggctcttccttccactttgccatggccttttcggtgaagtctggatggtgccagcgttgtggccagaccgggtgatggtagtgtttgttataatctacttccgaggcctggtcgatggggttgaccgaggcagattcagatagggacggagttgaattcatctgtgggaagtgacacaaaataagcgaaaagagggagagaagacaggtagtaaattataggagcaccactttgacaaggataggaccaagggagaggaggttcacgcgcgggtattgatggagaagacctgaaaaagacctgagaaggtttaaataggagatggatatatttgtttgaatatacttaggcctactcatcgaccaataatataaagtcttatgattaatccaaatagtgtaaacgtaaacaatgtagtcttataaactacatggagatagttatagagatgccgggatttgtatgggcccaaaggcttcgcgcaagggactcaaaaccctgccgtaggtggaagtggactttcgtacgtaagaggaaagtgaggttgacaaccctagtataattatattatttcgagcccagtggcttcctatctagcataaactcattgagtggccagtctctcatggactttttctttagatacatgaaaacaatggtatcccaattccaaatcccaccaatcatgccgcgaaggcttaacgtccaagctgttctgtgtgaccactatgatatagggccagcgactgaagatgcatgcacggaacccgatagcgagcggtgggaagcgggtcaactcccagatgatagattaatggtgtatccgtgcgggagagcagcaatagtccgattggctcgagcagactgatacaatctgtcgtgctcatataggacatcaataggaagaacactaccctgttggcattcccaaggaattgggggaagcagaggatgcagatggcgatcagcggatcagtaacacccagagaagagtcgtgggtgtgagaagttgagagccagacaggttgcgtgctgttgagcgcaggctggtgataggatcctggaggcggggtgctcgaagcctgttgagcttgttgacttttggatgtcggaggtgatggactcaattcggcgatgaagagtaattagtgattccaaagcgagcgacaagtatcaattgtaatgccatgtcgctgtacagcatagattggattgccacatttcttcgcgggcgttgaatcaactttgcgcttgttcatcagaacttgctaaggacggcaccgcgggcacagatagataaattgcacgctgatgtattcgccgtgacagtcatggaatgcactgccaaagaaaatggttgcctggaatcttgctcggactgcatttttgtcggaacaccatggcctggcgagcatggacaaagactgcaatttaattatcgagagcgccagagatcaacggcgtagtgtcacccgcccagaaagagaaaagaaaagacccgaggccgatcttcagatcgactccacggccagtctaatcatgggagccactggacgatccactggaaggggcctgtacacagacgagttcaaccataatatcgtttgggttgtctggcggtgcactattataagaaggagcgcgactgatgatgcccacagccacctgggaagcctgcttgtgggcgctcatgtgatcgagataccagacctgccaaggccaagcgcccgagccaggtggcatgatagtaacgttctgaccggggactcgttccctggcgaaatctagaaaagttagaacataacgctaggcagaaaattaatcgacatactttggaccggaatagcggcgacgtcgagagtgggcggcgggcacgaagtcagcgtcggcggctggatcaacatgttgtggagaacggcctcgagaggtttggaatagtattcgcccgacacggcaagaagatatatagcattctgcagggcggttttcagatcacgggaacaatcagcgccccagataccgtcgcagccattgttcgcgccagaaggggtgccggtcagattgccgatcctgagaccgatttcggatgtgcgatttgagtcgacagcactgaggttgatattattattttgatatcccagccaaaacgccgtcttggtcatggggccttcgcccttgccggaggaactggcatcaaagccgtagtagagcgtgacggggtccgggaataaaggtttgaggtcgaagcggattgcggtctgagcgagggagtcgatacagccattattccagaacgagcagaactgagcggagaccgattgtagtaacaccaacagggctagagataggctcaggtggaaagccatgtccaggatatatgtccagcgagagtgaccgcggaggccctcaaagtcaggataatcgagagcagaggtagggcaaggtcattacggggaaaggaggtaataaagggtgggagattaactgataaaaggccgtcaacggaagccagggaaacgggtccccgcaatacctactagggtctgaagagaatgaggctagtgccagtggaaagccccccaaaaaagggtctgattgttatttcggggtcctagggagaacgaacaattggcgctgccggtcgaacttgggaaaaagaaaggaaaagaaagtgccgagcccttgccaaggagaaaaccaaatatacagattgttgcgacttgtatgtattatttcaggtttctcgcattcttgtgagagcgatgtgatgggggataactcgggtacctgctgggtacctgggaggtacctgctgcaccctgtgggtttaggggaccaacaagtctcctggatgtacccccttgattggaaagggaatcttattttcagcgctaaaccagaagtccccgcattgctgtcccaaagaggaagttattggtgtcgatcagccacagggtaaagcagggtccagccacttagatgcgaccgatgcctcacacttggcactgcggtgtattggtattgtattggtattctatcgatcctttccttttctgcgtttaaggtcagatctcccggatttgcatgacctcatgttcattccagacgtttgaattgctagcaagggtattctgtactttgacaataataataacacaacacccaatccatacccggatgagatctgtgcgatatgcacgtcgtgatgcataccagatatgtatgatccttgcctgtgctccgataggctcgacggtaatatagctcctctgacgtaagaaaaaagcctgaaataattggcactcgctgcgtcatttggtttcaacgtctgaaacactctctcattggacgttgcgatctcgggttcgcatgttttcagccagagggttcttggctgactcggctgtgttatcgcgagacaccggagtccacttaatccagtaatcctccgtattcacgttactccgtgctcggggagaaatccctcggaaacaagattaattggaatgccggcttaccttctaactttcaggtatgtatggagtaccaacattctgggcatggaatattcgaaaattcgatacataggaaagataactgattttggattttgagtagggacctagaataggaaaggacagacttttcaaccaacaagccgagcgtatattaggctagggagttcaaaacaatacttctcgaatgtcacacatttcacagcctgcaattcatcgaactcagtccgcgtgatctagcctgtcatcggcggagttaagccacaggtatctctcgacgtcggcgctttgtgcctttttaaattgtcaagtgggtcattcatttgcgagtgagactgagtgccgggcacgccgtacttgtcgatggccttaagaggcaagaggtgtggcatgtcaacaatgcgcgttgtcggtcatcctgtcttgcagcttgatctccatactatactaaacaaacatgaattgacggcaaacgaaagggcgattgaaactttcttctgttagaaattagaaggcccgttgtgtaggtacatatacatacttcaacacttttggcttcaggtcgtatccccgaagcaagtcgcggtgtggtcgcatggaccataagaccgttcggcgaaagtggtattattgacgaatcggaagcgacacactcgatgaccaccagttcgccaagctccatagaatatcacaccggcaggggcgagaaaaaaaatccaaaaatccaagaacacaaagatagaaaattgatgcatattgtacaatgaaccaaatgagcgttaacatgctccccttaacataatgtacatccccgaggctttgccccatgcaaacagttagacatatacaaattcgaagatcaacaatcaaaattggagggagagtttcgatcacatccccacgccagaactccacgcttgaaaccagaatgcaatgattggtagattacccaaaacctgacagtccaaatcagaaatggacgtcaatcatttgtcgttctcaatggaacgatccttgccgtgcagccagacacgcttccagggaccgtcaggtccgaaagctgcctctcggtcttggcgcatgccttccaggacaccaacaacaccgccactgcgcagacgctcaaggacaatgtgcatgccctgcttgctcttcaatacggcctccttagtccgactcacaccgatgagctcaatagtccgctggatgccggcagtggaaaaggacgcgaagaatcccttgcgaggctcttcctcttcatggtccccagtgtcctgcttcttcttcccgagcagcttgccctgaccgagtcgggagcggaaggtaaccgtagtcttgacatgagtctgttcgcttttgtcgagaccatcgagggccaggcggtcttcctgggacaggagtcgcttgtagcattgcttctcgaccacgctcaggatgcccgtccactccatgttgcgggactcggtctccatccacccctccttggcgtcaacagtggtcttctcgaggatatagctctggccggaactgtctgagccgcccatgccttttggcagaagctttagaattccagaggggatcttggactttttgaggtgtagtcggatggtgtgcagacgctcggtcttggggtcgacgtatcggtcaatgacatcggtggtgaggacatggcgggaataagggttaggatagcggaggaagtaggcgagggacacggcggggaaggagtagtcgtaggtgaaattgttttcgaaaaacttcatgatggcattcggtgattcatgtagatggattgaggagaaagagcaaggagtcgtctgatccagcactttttgcctgggcgagcaaaggtagaagtggggatccaaggggattaatagttattccggggaatcagatgctaaagatcacatgcatctcacgtggtccggggattaggcctatcatcggcccgcaatagctaaacgatgtagaccactctttttgtccaattgaagccaagctgatcaattgactctaagataaatatgaatactgaaggaggattctgcataagtatggatccaatacagtcaagtccgacacagattctatactccatgtacataaaggaggtcacgtgccctctgaaatcaacatccaatcacccaaagtagcggtcaagaacaaactagaacccaacttatgatactacgagctatgacgggctatcaacgaggcttctcaagatccatacatgaacagtagagagacacaccaaacaggaaaccgggttaggctctcggatagacacgtttccgcgcaatctcacgtgatatcaatgtttcacccgttacccggatgtgtattgcaagcccctttataggccaacacatcccaggctaggcagaggcttaaatcgcgaatcgaattcgaggctcattcaatacaacgcagaaatggtccagtttcatgattgatcttcatcctctacctttataaacatgcatacaactaccgatcccgtccagactatggagactcgtatccgtatcaacattaccgctcggcaacgccaactgccatgagtggtccgatgtcctcaaggcaaaccgtacctcagaaaaggcgccctcccgagccgactctcgaggtcaaaagtggactccaccgtgtccaatatgaacggagaacgggtagaaggcctcccgtcgccaaaatggacaaatatttaaacgaggtcttcaatctcactcgagattcactcacttttattcctatctatcatagtcctccctcacaatgtccgaacaaatcctcgcaggaaagacatgcctcgtcaccggtggcggcggcggcctaggcaaagcaatcgcaacgcacttcctcgaagccggcgccaacgtcgtaatctgcgatgtgaacgaggaacgtctgcaagcgacctcagccgaactctcccccaagggtcccctgaaggccatcaagacggatatcacccagaccagcgaagtggagagcctgtttgagacgctgattggcgaatacggcaaaatcgacgtcctcgtcaacaacgccggcatcatggaccacttcgacccgatcggcgatctggacatggagctttgggatcgcgtcttggcgattaatctcactgccccggctctgctgagcaaattggctgttcggaacatgctggcgcagccgaagccggatgggcgcattattaatattgtttctgttgctgggaaggctggatgggctagtggtatgctctgaggtctctactggatgatgatctgagattgactttatttaggtgctgcctacacggctagcaagcacggtctggtcggattgaccaagagcacggctgcgtactatggcaacaagggcatcaagtgcaatgctttgatgatgggcggcatggaaaccaacatcgcggatgcgtttagcaagggaatgcatatggggggctatgagaagatgatcggtgtcctcaatgccatccaagctcctcccgtcgacgtgaatgaggttgcagggttctgtgtgaacatgacatatggaaagggcgccggccagatcaacggcgcgaccatcgctattgataacggctggacttccatcgtcgggtagactacgactatataggcatgttcttctcctaatagtgtatatatgacatacatacatccatccatcaacagctcgaaaaaaccaaatcaattcaaaacacctcccatcacctagaactaagtaaccaacggattcggcttcggcggctcctgttcccacctctccacaccatcgggaatatcaacaacagcatgctgacaccaaatatgcacagccgtcctcatcatccccctatccaaatcctccaaacagccccccttaacattcgtaatcgccgaaaacgccggctgttcgcccggcgcaggcaccgcatcccggaagcgatgcaaaagccgcgcgccacaccccctgcagaaaagacactccaattcgcgccccttgagcgtgacgcgcgtgtagctgtccaccagacccgacgcggactccgggagctcgaagtacgggaatgtggcggtgatgccgaatgcggaggagctttggtgctggcattcggtgcagtggcagatccagagttttaggggtttgtcggttggcgtggtgaattggatctggccgcattggcagcgcgctttcattcccatcgtggtgggtgggatgcgactggtctagttaggtgaggggcagatatgggttttggggacggagttacccgtcaagtttacgggtggcgcgggtgggactgcaacgttgtacgggttgacatatcggaaggcttgggttggtatgttgttgaattagtgttatttcaatatacggccttgttattattgtgaatctgattatcgaagtcttacgtcgttgacggctatataagcacccactattcttgtagatgtagttaggtttcttcgtagaagaactaggattactacctacaatcaatgaagttttttctaccaatccacgttatgtaacctcaatttcattgaagggattatcccgagtattcattctgtagtgtagaaacaacctcgatcttaaatgtcaaacttaacccgtgtaatgctcaaaacccgctttcatcatcctcgcatctaattaaccttgaaatatctctttgacggaaacttcaaagtttaccctcactgcacttcttgataatagcaatagccccgggagcctcgtcccaagcttcatatgtaaaattcaaagccatctgcatctgttcgacgctcccgaccgaaaacctcataggcttagcgtccaaatgcttacctgggttcatcagggccggccagaaatgtgcgttcaatttgtggacatcgttgtacaaagcgcgaatttgcgcctttagtctcccgatttccacgcgcttgtcgcaagtgatgatattggggttattgctgatagtcgacggacagaagccgagttccggcatgtgcgtcataccatccggacgtcccatgtcttccaggagcccctgcagcacctgcaacaccttgaccttgactaaagtcacggccacgagatggggcagatcgatccacctgccgcagaagatatcgacgggctcgagcggattggcgttcctgacgtccaggtacggcagggtattgttaccccagtcatagtcgtcctgctggccggtggtcgcccaccacttcaggaaatcgtagcactcctggtcctgctggaggcggatcatcaggctggggatgacgtcccgcgagcccatgttgtcgcctcgggagagatacagattgtctatcaggatgttgagctgtttctggagcgactcgacatggttaacggcggtcatggtatctgaaagagcagcgcggtagcgcatgtaagggcgggtctcgtggatcttccagaaatggccgatgccgtaggtaaagatattatcggggtggtcccgtaggacccgttcttcattctccatagtaatgcgacatctgcggattgcgctacacgcggacttgtgcttccggcggtgcgcggtctggtgttcgacgctgcagtagagcatcactctgcagccggagcagcggagaactctatcatccttgccgcatacaccacagcccgaggggagtggcattttcttcctagccgctgcagaagagggggataagagcagttcggtgtaggggccggtaaagggtttccagctctgtgaatgaagaccggaatgcttagggtgtaaatgagaaagggcgcagagggaagtattgggcgatgggaaatggaggaggtgttaggttatttattctggacattctttaggagttgataatgcctgtctgccttcaaagccaggccacaatatagttaggcgataacgtaccccaccagggcaaaacacagagcaaacgcgctaatttgcaatttgatatctcaacggttgtttgaatggtgtgatccttgcaatctcatttttatattacctctcgtcagctgagtgcgtttcaggaaagttaatatcacagcgactgggtagagtggagtagaccacaatgaagcttttactatagactactctaaatgcttatccatgtcgacgagcaatgaaatcaaagcgacatatggttaagatatagtattgcatttcctgtgctctcgattttacatctgctgatatccatggatggacgtgagacatgcggcatcgttgctatccactattccaagaatagctcgcacgaagcatagacgtttaatatgaaaaccctacctagactagcatctttcccatctagccctttgacaaagtacaccaccttcgcattccttcacattccttcacttccagttcctgtgccaacgcctttggccagcagtccaaaaccttatcgcactggtttcttgccactgacagcattactgcattacttcattgtgctcacaggcgcatgtgcatacatatgcagggaaacaatagtccaaaccttgcctctaaacacacagcacccagttcaaggacgagcagaaccgatataatcacaccaacggtcacgcttcgaagaaaaaaaaaagtcgaagatcgacggatcaccctgtggcagggccgcgcaaatccaactggcggtctgaatccacgacctccccccactcctggcgtcgtcaaatcagctgacagcctcaacccaccagccacactagatcagcactagtatccgtatcggtgtgcatcggacacgttcgatgtgaaaggcggtcggacggagactgagcttattaaaccgatactgctgattaatgtgattatcaacgaggttagggctctcattggtcgcggacaggagcattgtaaagtttgtcgacgattaggtttctcagtctggagtttcgggcccgagggctgcggggagactgccgagaagtatatgcggtagacaacataacatgcggtatggacttggccaagtgaatccttgtcgtggcgatggggcaggtagtggggggatggccttagccccggtctagtgttgtagagatttcatcgtcgaatgttatatcaagagaacagtcctgggctagacttcattcctatagtagaaatgtaccagactctttaactctcatcttcataacaagcttgatcatgttctacttcttgctaggcagtgcggtggcctataacctagtcatggttatctaccggcttcatttccacaagctcagtaggttcccggggcctcgtctcgcggccgcaagcgggctgtacgagatctacttttcggtctggggtccgggcattttcgaccacgagattgacctcatgcaccggaagtttggtacgctgtgtctggtatctccggggaaagatattggatctgatactttctaggtccggttgttcgtattactcccgatgaaatccacatccaagagccttccagctattccgacggttggatcaaaggtacggaggaggtggaacctggctaccaaggacgcagcgtccatagtttccagtacaagagaccgtctatcgcccgggtgcgatctctactttgggcgaaagtcaatgatatgatcaaccccttgatcgagaaacaccatgtggatagaatgcttagcgcaaggcctcgactatttcttatctgtccttggagtaagaagaaagttcagtcaattggagaaagcgaaagtgaagacggaggagctcgttctttgcagtgttaagtttgactccaactcttggacatctcaattctccgagtcgcatccgacgtctggttggaggtggagtcgaccaattgattccattgcatagtggaagatctgagagttgagctcgcacacggttaaccccgcgagattgtggagtttggcctttcttggctctccgtcgaggcgaatggacggcagttcccaccaacggccatgtttccatccacaatccggcatataccacaattcggggtttgtcggggttaaaaaaaaacacaaagaacaagaggcaattccggaagaaggccaagaaaagatccaaaggacaacgaaagcctttttttcgagctgaacgtcttggaagagccccgcttcggcgattctgccatttttaaagaaaaaaacgccagcaagccacttggtcaattcctctccattttattctcatctcctctctgcactgcacatacatctctgcacatacatcctacacctattaaatcatcatggtatgttgccgaacttcctgactccagaacaccgaagaccctgcagatcccaagaagctaacaaacatcaacagcctcacgccgactcctcctatttcactcccggcagctccaaggccgaaatatacgaacagctcctgctgtccacacaaggtctcctagacggccaacggaattgggttaggtgagtcagctccaacaaccctcgaaaccttgcaacctctaacaaccaacagcaacctctccaacgtcgcctccctcctctggcacgcctacggctccctcccagccccctcctcagccgtcaactgggccggcttctacatccgcgacgacaaattccccgccctcgcctcgcccgtctcctcgccgcccttaccaggcgcacccgggtacggcggcgtcatcatctcaactacatactcctgctcgggcgatcagatcctgctcctcgggccgttccagggaaagcccgcgtgccaggagatcaagttcgggaagggcgtttgcggcacggcggctgcgaagcaggagactgttgtcgtgcctgatgtgctgactttcccggggcatattgcgtgcgatgcggagagtcggagtgagattgtggtgcctattttggtgaatggtgaggttagtactttttccacttcctggtggggttgggcacaagcgggttttgggcaataatatatatactaacgttctcattttagacggtcgctattattgatatcgactgcactgagccttctgggtttgatgatgtggataaggagtacttggagaaattggctgctttgttggctgagcactgcgattggtaaaagttaacataatttggtttttataatggttacgacagatacggacttgggtgaatgatattgtacgttttatgatcgtgatttcttcctacgtagattctgcaacatgctctgctgtagtttactccttcctttaaaatgtacggagttgatatcttccgtgtatctttacattgacagtatggaatagggattgaaagtcctgctgtattgtattgtatgcgcaagtttattcgtcgcgaggattgaaaatgtaatgcaaaccagcaagccgaaatataaaacgatactcgacctgctcgagatatgtcggaaacaatagatacaatgcagaccaaacaccgagcgaactcatcacgctgggtggagaaatgaaaagagaaaacgccaagaccgagacggtaagaaggtatagagcacaaggaaatcgaaaatcgctaacatgcacaagaacatcacatattgagcaagctcatttgccgacgcatgggactcggcgacagagcatccccgtcttcgctgggaccgatgccgctgtctggaccagcgagcacggtgtccatgtcgatgtcccactgttcgtcttcattgggatcagtgttcacttccgcctcggcttcgccgccatcccagctcttctggaccgcgccgcgcgtgttccagcgcagagcacgctggacgctgatgaaccactcgttgttgttggacacgacggtcgggaatgggtactggctggcttcgacagtgacgtagtcgccctggcggagttcgacacggcccttgccatcaaaggagcagtaagcggtggatcgggaggatttagggacggcaatgcggagaaggtgggagtcggagagaaccattgggcggaaggagagggtgtgtgggcatattggggtgagaaggatacccgggatggatggatgcataagagatccgccggcggacagagaatatgccgtggaaccagtcggcgtcgagaagatacagccgtctgcttggacgactgttagcagctcgtcgtcggcgtagagctccaggttcgacacgtagggggacgggccgcggtcgatgacgagctcgttcagtacttcgaattgctcgccctcttcgacagcgcccagctctgctcccttgctccggtctttccgatatacggtgcatgtgaaccgcatgcgcagattgacgcgcatgcccacctcgcccataacggcattaagctgcgatttgtaatcggcaaactcgaaatttgtgaggaagcccaggctgcccagcgaaaagcagagcacgggcggaaccacgcgctggaagagccacgatgtgaaaagaacggtaccatcaccaccaagggtcagcaccaagtcgaacttatcgggcgatgtccagcacagatccggtgtccagaaatgtaacatctgcgcaaacatcgggtctttctgcaacagccccggggcatcaaatcgcttcgaattgcgcagcttcgcatctacatagacattgactcctagttcacttccgtatcttgcggtcgaaagtagccactccgcaacttcccgggtcaagagcaccaggctgttatcacgcgccttagtaacaatcatgacatttcgcaccgctcgcttgataggtcgtcgctgtagttgcttcgacacttcacgaacaccagtcgctgtctgaaccagtcgcgaatgcgacagccactcgtcgtcggcgatttcctccaacaccttttttatgttgacagcatcatcgaagcgttggtggaaatagcatggcgattgtagtatcagacgagccgcggcaggtgaacgatcgagatatccgctcaattgaaaattcgatagcgcagtcgagatgttctggggggagtcattgctcccccgccgtggtcggttctccgaaggcggggaagtctgagcggatttattcgcgagcatactcgacacagaaccggacatatcggtattattggtgataatcgtagcccgcgaggccagggctttcaagattgtctgtcgcggtatgcagtcggtggacaacgctttcttcgatcgccggctagtcgacttccgaaactgctgtagtgttgagtaaggcagcgacaaggcggcttcctgaaccgattcggatacgtgtataggtagcacgttgtcgggtccagggagatctggcttggtctgggacaaggattctatgctgagggcatctcggaggagcgccggtctgggtggggacgatagagaggggggagacgttcgcgctgtagacagactcgggagtgtgtcagaccgtagatgatcacggctggacgccatcggcttatgcggcaggtaaataagatgggataatcaggaaaagtgctcggatgtaacggggtttgcggatccgaagtcttgagatgctgtcccccgtcagtcgtggacccaggtattgcttctagcgtattccacactcttttttgggttttttcaggggggattccttttcttatttggtataataacgacaaggatgatggactggagtgggttgggattagggtagagattgacaagaattgggattggcaaggcacatccaagaaaaatgggattcctgtttaggaagaccacggacctcgatcatcacattaaaacacgagattatttagattgcttcctgcgattcccagattccccagataatcctctcactggcgagtctactagtcatcgccaaatccgtacaggcgcgcagtgcgcgcagataatgacgtttacactgtcatatcaatctatcggcaataggaggctcgttaggatgctcatagatcatgataggtattttatttctttggatcttccattctccgtgctactttgtgcattctttgccagaatgtcggttaaacatgtattcctcaaccccgactcgaagtgggcatagccatcattctgactgcgcctgggagtctgtggttctgtcaccgctaaatcacttggcaagtgagtgaccaaacgtcatcaaaagcagacagggtccggaatccaacaattgaggaacccgagaacaagcctcacgcaaggctgtcgcctgtggcagtgaatgaagcgtgttgtacatgcagcggcagtcaggtgacggtgccttaaccgggtggtactctatccactgttttgtggcaccgtcgtatcctagtcgagaggggcgatatagcgagtgctgggaagtcatgtgcacaagagaaggggcccaggggtgaccgcgaccttacacacgtctcactaactctccgcaaatttgccgggcgcaatccacctcagatagaatccagcttgtaggcgtagtcgctgtagatctggtcctccacggtctcccggatgaaaccgctcacactggcgctggccgttccttcacccatggcaacgtcgccatcagcgctggcggtggtctcgccctggcaaatggagagcgcgcgctcacggacatattcccaggtatcaaatccaaaccgaccctcgctttcgttgaggagaaggtggttcttcgaggagaaggcaaaaacgtggagggacacagcagccttggcggcagtcggagaggggtcccgcacaatatcaccatcctcagttacaccaaggagggtcgcggagaaagtcatcgacagaggaaccgaggcggagatcatagcgagcaagccagtatgtaggagagccgggaggatagtaaggtactagatagatcagtctgacagttcaacaagcagggcgaatggaatctgagatactcacattgtcaccgcgtgccacgttctctcctccaacaatagccagagtaatgaccacgccgcgacggggaaagcccttctcccgtccaaggacgattttccctagcacagaccgcaggattccttcgatatatctttcaccgacgccaccagttgtcgtaccaggtttgacaaagacctccacagtggcttcctcgggcttcaatgcgtcacggcgtgctgggagctcaatgggcccgttgacagcgcccagaatgctgtaaccggtggctgggcatttgtatgacgccgaaccatcggaacgatgtaattgtgagagggatgctatcggaccgaccatattgacgatggacagatagaaagatagaaaattaggaagccaaagttgtgtttgaagagcaaagtagcaaagttgttctgccactgcgatttttcatgtgcgggccgcttcttgattggccgccttagctgcgattgtacttggtactttgtttgtcgctggaccatgatatatttctgaggtatcgactactttgaggtgtcaactaaattgttgctttctttcccttatccctactattcttactattcacctccagactacagatccatttgatccgtcaagtggtctgagacttattggagtttcaatcaacctctcgaagataaccatgtcttctcatacgagcacttactactgtccaccatgacaaccaaatatgtgctgtgggtaaaccaacggaaattgctcttcatgttctagcttcgtgcttttgatttttgaaagacattgtgagcaaaaggcaacttcaatcgcatacagaatatccattgattctgccatcacaaggatgaccgttgtctatacaattcacaacatagaatcagaggtacaccattattcctcatctcgatattgatgaaacagaaaaccaaacccacgagacacggccgatcggatggcgggcaaggactttgcgtgctatgcatagtatacaagatacctctggccgatgatgagtcttgaatatccccgcgaagtcctgcgtaaccaggcctacgatttgagggcctcgccttgatatcgttttagcagaactactcatttgatccccgtacagtcttaaggagctcatctgacccattcccattcggagtgtccctattacttcccaggctccagagcatccacctccctttctaccattgggcagttgttagttccttctcgattgccaggatctggtaagaattgtaggctcctgatccttccaggatgtattcgtgatgaacctgtagccaccgcgtagaatttgggccagtagaccgtccatatcctcctgtttttgcgcctcggaggtaggttccgaccccttcctgggtgatactttgtcgggcagcctcctgacggatcgcctctttctcaaatttctcgagatgaatctataagggtccgtttgtcagatgtaatttgtactggaggtcgaaccggtacgcctgattgcgagctcgctcctcctcttcgcgtgcggaccgaggcagtagccgtgagcgtttgatgtgcttatggacctttcctttaggtgagatcgatggagttggtccctctagatcaggatgaaccgatccggcgcgatagcaaccgatcctgtctcattacggaagatggtgtcaatgatttacctgctctcaaaagggctgatgttggtattgctatgggcaaaatagaggctgccggtatggttttgacgatctgagataccaaatccttctcggtcttccacctcctatgcattgggaggggccttactctagaggatgctgagatgcgggcaagattggtaattcttaagcgtctatcacttagtactaacgcgagcatggaactgaagtgatctaggaatattttggctaactatctaacaccaagttggtcatgaattgctacctgtaaggcgttcaacgtgctcttcttattcattcattttctcgtctatatctatttttccagcatgaaatcatttcatatatctttaactagcatgtagtttcgccggggcttaatatgtcataccctaaaatgaaatgaacatggcaataaatctaatgacatctgagaagtctttaggcagtccacgttcaatgtcaactactaagcaggtcatcgtgctaggcacctacatagccccggagtgcgtgtccatttatagcttgccaatgatttactgatcaacctattcttactctcgaatcccagtccgtctatcccgtcaaggacaccaattatctctccaggtatcagacaaggctacgtatgttttatgtctccacgcatgttttttccctaaacctaatgcagacacagtaatccaattggccatcggcctgacctcggggagctaccccagttgccgatgtcaatatcaactatcaacctggagtggggtaaagaccgttatgaagaatttacgtttagtcaacgttaaatgatcagttttgatctgcttcccgagatgtgtttgaacaaaggttcgatttagaatcatcgcaattggtttggaactagtctgagctggcaagagaacagttggaagtgggatttgatgcgaggatgctaggggccccctgtacgaaacgcaggaggatggctcgattggtaattagatttgagataacgaaggaggggcaggtgacaagtgggcaattcaaggctgttttaggaagattctacattgacaatgtcaatttcaactaatgttaatgggaacatacgacttggatgcagggataaatcaaactcgattcaacaatgtgggaataataaccatggcttcgtgtttctctaatcatccggtagacatctagtagtgtcttattcaaggggtctcggagacattgtagaccagcttctcgccgctgaccttgccctccttgagcagctttagaccctcgatcacacccttcagtccatgctcgccgaccttggtggggtgggccttaatctttccttgggcgagcagatcctcgacaatgggaatgaacttctcagcgtgagccttgtcctccggcttggcggggatcggcgtatcaccgaaggagaatgcctcgccgatagtggtataagccagggtgtagcggtcgttcacattggcacggttaatcttgacgctcagcaaagagctgtactcgccgccatcggtagagatagcattgtcgcaaaacgcagcgctggagtcgagcgagatacagtcaaacacgagcttcaggttgttatcagtatccttgcgaattttagcgggggcttgcgggtccttgtagtcatagacatcatcggcgcctaggctgcggaccaaatcgaagtggtgcggcgagcaagtggtcaggaccttgtagcccgacagcttggcaaactggatagccagggtaccggtcgcggtggagccgccgtagatcagaatgggagtggcatccttgatggggtcggtgggaagggcaagcttcagactctggtacaggccctggcccacggtgttgatgcccacaccgagggtggcggcctcttggaagctgatattctcgggtatcttccactgcaagtcgcccttggcgacgatgtactcggcgaaagtgccgtcctcgggctgcactgcattggagccgtgcacgaagccacatacgcggtcaccctttttgaaatcctttttgacatccttgcccacggcctcaacggtgcctgaatagtcgcatccgacgagaacaccgggaggagaaaggtaggcaacgtgcttccagtcggtggggttcaagcccacactgacggtcttgacgagtagatagtcatcgcgaagcttggggatgggtcgatcagtgaccagaccctcggtcttgggctgagcgatgatgactgccttcatgatgggtagttgattgcggagcgaagcgaagcaattatatagaatgcagttgagaagagggaatttggagaattgggaggatatagagtgtgtgttagttaaatagtgctctgattataaatgctctgattacaaacctgaagtatgacgaaaggcaatcactgatcgtcacaaatattgtaccgactccgtctcagtctatccgccatcctctctacacagcccttggtgaacagcgttgcccctggaacagttcattgttttattgttgtgccacacatgccagatcaagacgctacacagcttttacgggagaacccccatgaaattgggcatctttcgattcaggcctttgatactctgccttggttcagtctcttgaccggtcttcgatattgcacagggatcattgacatgaacacgagtcgtgcagccaagattggacgcattcagggtgttcatattgcgtcatccattccctaaaacgaaggatggctttggcatatatgaaagaaacatgtatataccgtagcccaatggtctattcttgatagaggaatggtcgactttttaatataatatttgcaccaataggcacattcaacgagcttgctatcaaaatcggttaactgcaatccgatttaggaatcaagtgccagaaagacatataccaggcattgatagatgaagcagaccgagagacaaactaccagccgatgaagaccatatcttccagtctctcgagattttatattgagatgtctgacgccagtataagtatgaggtaatgaggttcgctagctagcgcaaggggtatcagccaagaccacgagcaaaaacagggttcacgcaatttgagaaaaaccatcagacgtatatatagctattcgagtccaaaccaacggattcgccgtcttcgaatctccattcaggacaagacgtcgggggttgggatatcgcggggtcagaccgtcaaagtcggttagtgtacgttagtgcttatctgcatagacgacccctcctcgacagaattcctcccagacttctatttcaacttcaagaagaagacaatcatgaaggttctctgtctccacggaaaagggaccagtggcgctatcttccgctcccagatctgttagctcccccgcagtcccaaaccaactctccaactaaccgcgcccagccacgttccgctccaaactccccaatgacatccaatttgatttcatcgatggcccatttaagagtgacccggcggcaggcatagatatcttctacagtccgccgtactactccttctgggaaaatgatagcgtcgaatccgtccgagcctcctacaactggctgactgagcacatcgccaagaacggcccatacgatctagcgctcatgttctcgcagggctgcgtgctaggctccagtgctctcctcttccaccaggaagaaacaccgcatctcccgccccccccccaccccgcggggggggttnnnnnnnnnnnnnnnnnnnnnnnnnnnnnnnnnnnnnnnnnnnnnnnnnnnnnnnnnnnnnnnnnnnnnnnnnnnnnnnnnnnnnnnnnnnnnnnnnnnnnnnnnnnnnnnnnnnnnnnnnnnnnnnnnnnnnnnnnnnnnnnnnnnnnnnnnnnnnnnnnnnnnnnnnnnnnnnnnnnnnnnnnccccccgccctttgaaggggggggtttttatctgcggtggcgcctcgttgagcgtgctggaggagatgggcttccatgtttcggccgaggcgcgcgatcgggatcttgcatcccgggctgcgctggctcaacaggcgggctcgtcggcgctcttggctcagggtgcggatcgctggactgggcttcagacggtaaacggcgggctctcggaggatgaagtgcggaaggagattactagtccctaccgcattaatattcccacggtgcatatttacggctcgaaggatccgcgctgggcggctggtgtgcacctttccggtatctgcgaaccgacgaaacgtcgcacctatgatcatggtggtggacatgaaattcctcggacggctgctgtgagtaactcgatcgcggaacttttcaagtgggctgctgcacaaagtgaaagtggaattcagtgaggagtgaattatattatgtcacactttatttttttcaatagatgagatagattataagtggaaatgtaaagttcggcaaattgtattctctcgagaggtagcgtgggcttgaactaagatatgagagggcagagagatcgacaagacccaatatttggctccacttgccagccttggtattcccttgcctcgtgtatatatgtactcatcatatccatctccaacactccctattaatagattcaactcgatcggtaagagatttccaaggttagccctaattcagccacgctagccaattccggcccactcgaaatttcaccctctgcccatattccgcaaaagaaaacgaattgccaatatccatcatgtcatgggatgaaacgctcaagctcacgcaggccgatgagtccgaggagttcaagttgttcgaggcggttgtcaacggggatgtcacggtcgaggatgccgtgcaatgggtcatcaccacgacaatggacagactggaagactacgggccgggaggaagcatcgagaaagccgacgccgtaacgttcatagctatcatcgagctggctatgcaaatcgatacaacccagtatggaccgctggttgagttcctgggagaattgaagctgtacaacgccgttgattcgtcaacgggcttgatcctaaaaacacaagatggaagcagagtctggtcacatctgccgtcgctgaatttctgggtcgccgaaatatggacagaccggatgacacgtaagcgaaagcgaaagcgaaactgtttctgtacttttcttctgtagtgctgacctgtcgattcgcagaaatctgtgacccggatatggaacccgatcagcagatcagatgggcgaagctcaatatcttcctcgcgcaagtgacgcaggcggctgaggttgagtatacttccctgcaggtgtcgatcagcgatgctatggatgtatcgcacatggcactctgtggactgcgtcatgtgttcgaagagcgcattccttctgaacatattgcctcgacggcgggtctgctcggtgtgtgctactggctaatctgtgccggtgatagactctgggagaatgtactcaacggccgcaaatacaacagatatgatggtcgaccgggagaattgtattcagatcgcgggtggaagggctttgaacgcgaaagatgggatatatgggtgcagggtcttcgtgacgcgaaggccgcttgcagaccgggcaaggaactcgtggaagatttgatagaccgggctctgtccaaaatagagcgtgtaatgagtaatgaaataccatccaattaagcatttacaaactactacgttgtaataatttacacgtcggtttcgaaaacaaacattcaaaccggtttatgaccgactcttaaacctcacagggtattgattagagttcaaacattatatatagaaagacgccaaacacaagctatctagaaacacaagtcactaccatgaaaaagtctcttcaaacagatcaaccgtcttctccccttgtacattcctaacagcctcccgcacactatcacccaggccaccaggaccgcaaacgctaaccgccatcgcaccgatctggtcttctttttctttctctagcacggattgcatacacggcttaccgtggtggatgctgaccggcacgccaggcggagcacattgcatccacagcgaatctggctgagggacatattcctcgacagcatccttgtgtgatgtgatgtggaggctgatggacaggaggaggcgtgggaattggaagaaggagtgcccgttcgagtttattgggcttagggattcgtgccctagtatttcggccatgaatgtttggatccatgcgagatggtctttccatatgttagtgggcgattatttatgtggaacaggtgggcctgatcataccgagactgcggacgatccaaactagatgcactttgcgggtagctgtcttttgctccgtgaacgtggcgataacttcattcaaatatgacatcgggtgggtaatgccgattcctccggctatcaataggagagtaccgtatgaggtgagagaatggataccacctgtgagatgttaaacatgtttcaaatatcaacaaccaatgggtaggaatccataccaaatggcccctccgccaacgccatagcctgaatccgtccctcggcggaggcttctgccttctggagcaactttttcgtgaatccgtcttgacccttgattagaacagacatggttgtcgtcgccgaggctccagtaagagcatccatagagccacccgagccgcgcttctcgttcgtattcaacgaacccgttgacgaccacgcaaccgtaaagggatgcgaagtccacaagcccagacacggcatgtagaggtacatatactgcccaggccggaaacgccatgcgcgagccacggccacatcaacacgagcaactgacccagacagaacctcgacggtagcagttgtaggacgcgagctgagatttctccaaagcaatatcccaagtcgacctgcacgatccagaccccacaggatcaaggtgcaaagcagcacacgctgttgcagtaggttttgcaggtgataccagagcgccacgaaggaaaatacagccagggctatgtgcaggtgaagaaatagttcgtaaaaagcatgtcgggccggcgacagagattgaacgaaaataaaaaggaatccaatgatggcctacggagatatatgttagatggccatgtgaagtgctggtgggctgcatcacataccagaaggccgcatataaaaagcttcttctgccaaataacatatagaacatagtccgtgccatctgagttcaaggtttcatgttagcgaatgatagccgtatatgtgcaaggccactcacgtgtagaagccttgtcagccaacacggcgctcatgtggatgacggcgttggctgtgatcacccgtcccacccaacgatgcatgaaattaaacgtatcgaacgagatccccaacagctggactaaaggattgttgcgtcctgcgcctaggaccaagcccggcgtattcatgacggccagatggcccgcggcgtacttaagctggaacatcttcttggagtaatcactgagccaccaatcgactgtcacaagaatgaagattatgttcaagctgatatagatcagcaagcaaatcacttccaatcgtagcggaagagatcccatatgaagcctcaagaagcggaattcgcgactatggcgattgccccatatcggggcatacagcagatgccttttcagggccgccttgaaccgacttgtctggcacagctgtgtctggtcgcttccttgccgtgcagcctttgatcgtcgacgatggctgatgcgaatgacagtcttccagacgaataaaaaagctatcagtccgccgacaacaaacagagggaccgcaatcgtggggttcataggcggctccccccggccatttcctttgagttccacacccatcgtgccattaaacaggcaaggggagctcaaggtcaggtccacaggcacagggatcgtcgatcgtcaaccacaatgaacagagttttaaccctcaaggattcaagaccaagaaagggaggacacaaggtttaaacgggatagtgttataaaggatactcgggtcgcgtggggaaaaaggaagacgtgggcatcattggcgttgtattagtttccataccagctatagacacatgccgtcattgaccgctggaggccccgcaagtttattttctgtgaagacggacgaacccaccctcacgtttacaaggcaagcgtagacaattgtctcacatggccagtgtaacgtcgaaacgggcgaaacggatcttggcaacgctaattctattctgagtggagatgatggacgaggctgagtggtgaggaattccaaatatcagggaagtgccctgtcatgaccaaatcgaagggcatgtggacctcgacatagtgtggcggactgtgtaatctttgcatgtttgggtgttctaagaacacggggataggcgtggagacggagccgctactgttcggcaatccggaaacggaatgttgatacctgcactgctgtcactttcagcattcctcgtcccaatcagtcatgagataggaacaaagagatgagaaattcaaaactaaccattttggttcctagagagagttaatttcgcttgatctttgtagagcaattgtctgaatcctcaatagcaagatgcttaacgtagactcgaaccccggacactcggtccagtgggatgcaactgcaacattagagacaatggtcaagttagaggaagctgtagcgtagtagtcttggaaccttatatatatgacgccatagtacactatggtcagacttgcaggcgcaaagacttctgaattggttcaagagattctaggtagaggtccgtgtgtttagaatgacaccagatggacaattaccaaacgacttctttcggcctccatgcccagtcagtgagctccattaagccaagtctcgcaagcatcgctaagcattccgcttcagggtaagttgacggtcgtagcggggctgccccaggaaaactgagtatgtcacgatgtgtaagagaaaggaacatgatcatgatcatgatcttcacggaatatttcagatgagtcaaagttcagtacctagtggcgtgactacagagtccagactacaggtcaggagtcaggaggtccacggcaatgagattggtggccttggcgtcctggcgaataaagttgatgccttacattccagtttcgttgcatactacttagtgcactgtttccagcactcaaatgatgaggcttatctctctaatgtactattaaaccaccgaagctgatacaggcaaagggcgacgggcgaagttggtaattgtcttttctacttctgttacatcctgaggtcctcaggtctagattgctccaaacatatataaataccacatagtacataccaaaacgggataactaaacggtgtgataccggaatcatcagatcccttgagctgtgacctctatggtggctatggcatgccgacaatggattgttgcatgtcagaaaggagacaaattggaaacatacgcaaatctcgctgttcttgtagagccatcccctgtaaaaactgattcctgagaacaggctgaatgcagaattgttctattaggagcctaggctctatagaccagagatcttctattcatacagcacaaatggattcattcaaatatcaattatcaactatgttatgataatgccattctagttggcgctagagcctgtacaaatacgctatttctggggttattccattccccctttttctcatgaccaaaaggccttgaccataaccaattagaaatacaaaaaccgaaaacgccgtcattattgggtttgcataagtgacaccacacccgtcctaggatcattagacatctcagctggggacctcctgtacattggaaggggcatgaggtattggccttccatcttcttcaacagagaggctgccatacccagtgtcgttgctagctgatcgtgcccggcggagaggcggtctttcgacaggatagtcaatcaggtcttgatcggcgtcgctttcggatgactgagattctcccttgcgacgacgggtcctgcgtttcttagacatagccctgtcaggtgcggtgtgcacaaaatcttcaacattgatgcctgcattttggcagattgctgtgcacgagttgacaatcacctcgacgagagtagatgaaaagccgtagaaagccggggtgtaggcatttcgggcccaatatatgagctctgctgatacccgcccgagattgggaatgtcacgggggcagagggagagcttttgattcggacggggtttttcttcggcttcgtcgtctgcggaagagatagccgcctccgaggctggagccgaaggggatgaatcggatgacgcaatgtaatccacgtcagaggcgaggaggtgtaggagatgatagacagacgagaaaccgatgagagaaagctcgactggatcaatcggaagctgattgaaccaagacacggccttctccatggtgaaggagtcaggtagtgaggagacaccacctgtggaccgttcggtgacaatggtggcaatcatagcacagcgcacggcgatggagatttcatcccgcacggaaacgggcagagaggaatcaaggaagttggatgaatggctgtgacttccctttctcttctctttcggtagcgcggcaagaaccgccccaacattttcaatgcggttgtgctcgaagaaaacggctttcatcacgagtgcccgagtatgcgcggcggaaagcaccggcgccacatcaagggacatccgaatcttctctttgaatgcatcacggcttgccttggacaccgggcccttcccgcttgcttcgaaatagttgagaagagcggtttggagaagatgactggaccaccaagctgcaagtgcatcttgggaacattgaatagctgggtcctcatccacaacatcaagcagcacttcgtcatcgccagtaccctcctgggttggtcgattccaggtcaggttcacagcacgctggataatgttgtcaatcatgacatcctcgcaatccagtttgatcagggcagcaagatgagggggaagctgatcagggtgaccctcgggcagtgcggaattgatttctcgagccacaccccactggaatctggcaagagctcgcgcaatgtcgtttgacacatggaatgaccaggagcccgcctctccgacgttccacaagagaatgcggacatgcaaggcctttattatcattcttgcgggagtacaagggagtgtgccggcagcgaagatagtgagcacaaggcggctcttgctgatctcagcatctccaccagtgagttgagcatcaattgcgatatcccaagtcttgactcgtcccttctcatcctcctcggtgattccggtggcccatgagtagactttccatcccatgaagcatcgtaagacgtattcgaagcatctcgaagtaacaacataccactctcggaagaatctatgacgtggaacaccgacccgttgcatgctagtcagccaagcctgccgacggaaatcactagatgtaagaggcgcagccgggccctcagtagccaatttggatgggccgcgtcgggtgattggctgcgcattgaacaagtagacaaaaacgataaaggcactcccaacgaccagcgttgccagaatgaggaaatgcgaaaatgcacgtgcctgccacgagtaccagaactgcttcaggtagaattcacaatgtgccagtgtgggggtttggaaacggccgagaagactgatggggagtgaaaacaggcccttcgactcggactcggaatcgtcagagcccataccttcaagaaccatcagaccggcaagagcacccagcatatatttgttgggcatccttgaacgtcgagtggaggtatcttctctcgcatactgcggttgatgagatgaggatgatgacgaggggtacttgatgtatgattcagcaaagacaccttgctttgccgtttcagctcgcatacgtttccacgcatcgggaactggaaggaggccttctggggggttcggagaggtgggtgaactctcgctggacacatcttccgcctgagaaaagacactaggtgatgtaccggagttcgagtccgtcgaggcgtagttgctgggcgaggacacagaacctgaggatgtggcggcctgatctgctactttatcagcctggcggagtcggttcttcaagtcggtgttttcgtcttccaagcgttggttacgaatttccagatgtttgatgtactccgtcgctttcgacaaaatggatgctttgttgagcttgttggcagcatttgctccctccgcttcgtcgtcatcatcggctgagcctccattcggattcttgggcgaccgcaggctgggaacactgtcgcgaagttcggcgattttatcgttcaaattggcgcgataccgcttctcaataacgttgtgagctcgcttcttggcgggcattttcttgcccggctgcactggtccagtcactgtggtggcatcgtcatcgctgcccgtctttcgcttccggcttgtgccaacactggagattggagacaccagaccgtaaggttgctgctggctcgtacgatttggtccaggcaggcgatgggtgtacccaaggttgttcccggcattgggctcggatgggatttccatcaagccgagtggaaggttaggcgagaagtccccgtagttcaaatgacttggggagctcatatctgtctgcggggagatggatggtagatctatagatgaggccattggcttttgatctccttccgagaacattggttcatcccatcgcatccactgggtccaatcctggttcacattctctccgacgggatgtgtgaacaaatgaccatttcctcgtgtctcatccccaccagggtttcgtgaagaaaatagctgaaagtcattctccatattaggaccggacatcttggacggctgggtcctcggccaatgtctaagtccgaatgagtattgggcagtctagatagttgtcactgataaacatgttagtttcagtaatacagaaaagccacagctcctttaagagaacagaatctagctgcctgcacagccataggcaagcagaaagctaggccgagacaggctagcggcgatccctgagagcattaaggaggtagatagatgatactgactgggttcaacttcaagtgtaacgctcgaactcaaatgcacgaagcttaatagacgtgaacgtactccgtgctttctgcaaggtgagatgtaaagactgagttgcgaggagggggatgtgagtgtaacagtcacgggcggtgctaggcgattggaggagcagaaagcaggggtggaagatacccacatacagacgtaaagtacttagggcccaaggaagcaagtggattcccaaattcgttggcgtcaaggtgatctccaagagaaggtggatctcatgcgccttgagaaatacgagaaacaacgtaatgggaagagacagccctagagatacaagctattgcttcaaactgtgattaaactgccagagtccccatgcatgaagatcaggggaggttgaatggccaggcagccggggaaggcagtttcgtcgtatgatcgcggctgaccgcacttccggtcacccctgacggtatcccgggcgttaattacgctgagtcatgatattttgtgcgtgtaacaatgtaatttgtgttttgtgacagtaaccaaaagtcaattatcattggtcatcaatatccccactttgcctcctcctgcaggtgcccaagaacgtttcgagcttcaacttcttctcttctttagatttctttgtctactgcgttgtatcttcttcctaaccttttagattcacttgctgaaacaaagcgagccgcatttctcgttttcctcgcactcgaatcggctgaatacgtccgcgcgtgatgtcttggcgccccgcgggtaggcgacacgggaaaaaatgggcgtgttatgatcttatctgatcgtgctagtctccactcctgcctcgtcggcagcaccggaaccagagcaacggcgcaagaggcgaatggaatcaacaatactcgtactccgtacaatataggctatgtggatctgaatccggtatcgcagtccacatttattcacttcgacagaagcacatggctctcgcgaccaatttctggaaagctaaatgaaaatctctgtctgatgcttcggacaatatgcatcccgcgtcaaattccattgaaccgccgactgatctcattattaccacaataagctgaaatatgttgactgggtaccatccgggcaagagattgtacttgatcatcccctcaccgactccttcaatacgtcaccgacctcctcgtatggagcacccggcttgagcctctctagcgcattccccactgtgtattttatcaatgcagagcacagatttgatacataactcactgatactatatctaagttagcacgtggtcatttgttacaaccaataataaaacgggttgcatggagcctagatcggttgtgcgggcccgattatgagctgccaagctgagatgagacttgtgttcacaagggtcgcctttcatagagttgagagctcgttggtgggaccccgtttgtattgggtggaagttatagccgttccttcagaaaaacctggctggattgttagagttacattttcaacaatttggccgacatcggcgatgaggtcgccatagggatcctcgatgtcacctttgagaacaaagccacaactgcttcacgtcgaaaactttcatggagttccggggatcaaatatggctaagagtcctttgaagacattatagctaaggccaggctctttcgcggtctttgggggtatttgtactgttttctttatgaaacaaggtgagcgatttgtctcaagttttcatatattctacctagatgcgcaagtaatgtcggggctcttggtatttgttcttcactcagaatctcgtaccgttcttctcgactgcctagtccccatgaagcctatcatttttgattcagacttctggccgactcttgagagctctttagcgaacgagccgggtcctctctgtagtatgcaggatatttggggatggttgggctcaggaaattgaattgagtggtagaaaagatgcctctgagatttcaaaggatgaaagagaaggtgtaacgtatagagtgatgggatactatagatttgatcggtattactaccatgaacaaaatatgctaaagagcactccatttgtggggcattatacccttctccaccttaatggatcgacgtctgtgctgccgagaaaggatgaaaaaacacatttgataggttggcattcaggtgaagagaggggagaaaataagaaaatcgcaaagtggagggggaaggcagagaaactttgtcttctcgaaacctgccggtaccgatgagttttgcatagcattcaaaataggactgcaagataatcttccttcaggttcccagctggattggtgtctcatcaattcagttgcacgtgttccaaggcccagagagttctcaacggggtcaataacatggggaggcgactgagaatagggaccaatctgaatacttcacgagaaagaaagtggtagacaggctgaggactttatggcatcactggtgtacaaacatacgcgacgacaaaacatcaacaacagtatcctcttctccaacctcgtgccactggctcaaggattgatgaaaagaaaatattctccacgaatggaggtgccaaataatacgtctgccgataacacgagtgccattgaacaaactgttccgccgcgtggtgcaatgcagggaccagcctgtggtgaactgtcatattgatcacagtcacccaaacatggtacgatgaagaagaaagaaaaaaaaaatgagaatacgcggggaggggctcgctatataccatttaccagaggactgcgccacaatagaatgtttgttccttttgtatcacacgcctcgattatccttagggattcctaagccacagagtactgccgtgcatttgtgaaaattctaaagcaggttagttgagcggtacggcccgccccgtcgatgtgaaaaccttatatctccgtgttacagtagaagtcaccaacgaatttggaaattgaggctagataggcgcagaagagcagagaatgatatgtctcctaattgtattgaacaaagtatgacttatgccgttgccgattgacgacgtgagacggcgaggactatacatcatcatcatcttccccagagctttgcttacacacttgagatacaaagcctgtgaattatgatggaaatataccatggtctatccaacacaactgagatctggtatcctactcgtgaccccaccggctcatcaaaggacagcagctgatagggccagtggaacttgttactctcatgcttttttaccaagcgcaaagcccctagagagaccagcttcgacacatgttcagggctctcgattaagtgtgcaagatctctacgaaccctgcctgtgctgctcacatccctatttctccacctcaggggaatccatggagtctcggaaccatgaaatccatctaccgtcatattctctacttcgaaccagcgatccttcctattgtaccagaccaccgacactgcaatcgttacgcgacgagtaactactgagacaatgctcgcctgaaaggaaaggccttccgtcgttgcttggctctaatcgagcgatgcacaaatgatgtcgaaattgcactatgtatacagtgaagggatttctgtttcatgtcacatttgagaaggagaatatggcagtcatagtctcatttgtcagttgctcgtgatgagaggatcagcctggtggctgatcacccagaacggatataatgcaacttggccgaatacatcgtgcggggggatataaagagatagactccatatcggtgtctggccgatgatcaggccaccaaggtcctaccggatttcagtccgttcaaatataggaaggaatgtcttaaaatgagtaccttgcgatttgctactgttacttgtctcaatcacttcaagtcaaacactctttcataatttatttcttaaatatagattcatgctttatgatcttgcgagagagcactctatgataatgtgcatacatgcacatatcacactaaccaaattactaactaaaagagcaataccgagactgaaatgagctcaaccttcaatctcgactaggcagcacgatgcaaatttagtgctgcagggatggtcagtaacgagtctacaatgtgctagagacaatcaacttaccgagatatcttcccatttctcccagccacgcccacgaacctgagccagttcttcatccgttagctgcttgccggtagtgaagtatcctgattggatcttggcatcgatctcgactcttgaatcactagggatcatctcatcggggatagggatgcgctcgataatattgatgccggagttcacgatggcgtcgtacttcatgttggacattgacagcatgcgatcgatcttagtgatgccgagccagtgcagaatgtcgggcataagagcttggaatcgcatctgcaggggatgaggtcagtatatgcgagtcacgtggaatgatgaggatacttacgtcgcggacacctgcaatattctctgtccgagtgaaatacttatcggcggtgtcgccaccacgcttgcgcgcattgtacacaagatacttaataacttctccgagggctcgaccttccttgcggaagtagattaccacaccactgccgccgttctgtgcctctcggattgcttcgcgaataccgaacgctaagtatggtcggcaggtacagatatctgactggaagacatcactaccattacattcatcgtggacgcgcagagccagtttgacattagggtccgcgatccgctctggtgggccgaagatgtacacggtaaggcctccgattggtggcaggaatgttttcagatcaggccgagtgataagctcagggtagctgccaccggtatgttcgaacaaagtccgacgaagagtgccttcatcgacgccaaatcgctctgccacaccgggaagataccagacaggctcggctgctactttagtgacacgcacctcgccggacgaatcaaccaagacagacccgtccacctcgagcaggccattcttgacgtcatcggcaatctccgcgagtttcatgttcgcccgagtgactgccatcgttggacggatatcccagccagcctccagctcttccttgaactggttgacaatgtcatggccgtaaggatccatagagacgatctttttcttatccgcccaggcaggctgcggggggaaattgaaagtcggctgagaattacggaaatccggtcggaaatccgcatccaagtcaccagcggcaatggcaagggcattgtatacgctgtaactgccaccgtgggcgccgatggcattgcggcgcttgacgaggtttccactgcgggatacaactaccggaccccgggatttggcgtcgggagcgccccactccagagggacgggctcaatgccgctctggcctgggtacgtggtcaactatacttgatatcagcatcatccgaagacattgaagtcagcccagatctgatctttcttacgataatatggttgctgtatcggggattggggtcggcgggggctgcggaggctgcgggagctgcgggagctgtagatggttccatttgtacgggcaagatattggtgacggattctgttttcaacatggtaagagaatatacggtcctggatgattaccagaaggatgaagcgatatagagaggttacaaagaaaagaaagagggggaaagagacctggaggaggggaagtagtcggccatgtgacttatcttctcctcacgttatctgaggggcttatctgcatacaatcaaaaggacgaccggtctcagatagcacgtctgaatgtcttggctttggttatcatgtagtatcgtgtacaaatcgaatggcggtatatggtgtacatacaagttctaacgatctccctagcttctatacggcgtctccaccggtttccaccggagttcttcggcgttcgatctaactggccggagttagcgaacaccgaaattccctaggtgattgcagtttgccttgaccacggagtccgtacattaagcaggatttcctgtatctccccatgaggtaaatgctttcgttgatttcaatgccacccgctaacgacgtgtacgggcagtacctcgcgtcgtcgcaatggcaaaccagcctcctgcgagccgtgtcggagagacaaagtccgctgcgaccatgcattacctgtatgtactcgctgtagagatcgtggggtctctatgcgatgttactatcaccccgcccctctgacgagggccaagggtcgccgtatcttcccactggcagagggggtcccctttgatcgacctccatcagcaaggtatgttaattgtaaattcagttctttgtttcattctcaagcggtctacaccattgagttcccagcggccaattaccgcctcaatttacctccatagatatcaatatatacatatcagcctcttataattgctgtttcccaggaaccctcatccaaccgagacatcactcaatcccgacgtgtctaatgcgggacaagagagctcttctgggcgcatagcccgtacccaaccactgctttctgggtacttcggccccacgagcttcgtatcccccctaaccgaggatgtggacttgggccagggtctgggtctggagattgaatctgcccagagagtcctgccaccctactgggtccacaagatctccgaagtactattaacactcaacgactttcccgcagttgaggccctaatccgtgattattatgcactcagccaaagcgcgattatagcggcgccattcgtgctcaacagccttgaaccggtcaaatccatgtgcaaagaaaacatagcagaccgtaatcttaccgatttcacatcttcactgacagtgagcataatacaaaacacatctgagattttcgaagttccgtctgcaacacaagggcgagacttccacaccctatttacggggcccgcgatccgcctggagattattgggcttctctgcgccctcgctggtcgggcaagatatctagggctcgcgagtgacaggttcgatgacggccgaacctcgcggtcacaatatgcgcataagatgcttgcagccagcgaggccgcgctgcacatttgcaaaattctcacaccgctcaatgacctgacagtatggctggtacatgagattctcctattgtcggatatagtacatggcgactccagttcgttaagtcttccaatatatcagtcaccttgccttttctaacacctttcaggtcccgcctgttggaaacgactaggcgagctttcaactgacatttttgcacttggtcttcaccgtgactccaagacatcgagcggtgtacccgagtttctcttggaggcacgtagacgccaattcgctgcagcgtatcagctcgacaaaagcatcgccacattcttaggtcgaccgccaagattaccatggcgatacgccgattgtcgcatgccactcgatatcagcgatgaggcactcgctaccgataaaacaatcctagattacactcgcgactgcattgatgagaatggctggaatatccacggagtagtccagcggtcatcatggattcgagtgcgatttatcatcagtacatttcgggatgagattctcgaggtctctttgcagaacgtgacacccgagatggaaattatgctcaagtaaatcatccctttctccgtactgttgttcagcagctgaaactatacaggaacatctctcagcgatgtcatctagcatgggattcgctccccggttggctacgctacagcccgcaatgttgggatcagaatttacacgtagcagtgtgcctcatgatgattatttcatatctggcatacctatacaacgacttcctcattcagagactcattgccgggaagaataatccgcgcggaaacacagcactgctctccgtgagcgctgacatattatcaacggtcctgtcattaggcattcaacgcgagcaaatgattgatctccggccagattttgcgtggacagtaagtactaactaaattgaagctacttctacccatgatactaagtgaatggcaggttctactctacggcttccccagcgccagtctactcatcaaagctttgcagcatcaaaaacgcacaggcgagccattcctctacgagggatctagatcggcacttatccgcaatttgagtgtcttcatttcgcatcttgaatctatagttcggccggataatgccaactatgctctctttcagcgagccagtcagctattctcgaggattatcgatgagattctagagccgcagtccattcttccggactcgaatcttgatagttctgcttttgactttgatccgatgattgaggttgatggcctggattttttcaataacatggattttggtgttgcctttaatcagtggttgttttaggggcgatccgtgtatatagtcgtgacggaagtgctttgtgaatagacaaatcagagtatagatctgcctctgtgaatttacctcaaggggtaatcatcaacatcgtcagatcttctcggtctcactcactaccaccgtattgggctagactgtatgttctctacgctatgggatggagtagaatccccgcggaacatgaactctcaactatatgaatgattagcaagagaccgagccagagaaaagacagacataggctcaaaggtgattccacctgtgtaatgacgtctgtctaagcaaaagtactactgagtcaccgacttacctcgggaattcgacgcagcccgaggaactgtagctggggtctaagttgtcgtaggtaatggtgaccatgacgatagccagggtgagcgatatcctctgcgtgtctcaactccgcgtcgattgttacgttgacattattgctaaaccccgaggtctccatgaactgggcagagaaccagttccatgacaggacgaggaagatgcgagggaatctgaatacacgaaagattaataggtgccgaaaaaaaggaaaagaagacaatctacaaagaggttgaaaggaaaaagaaattgtggtttttaacaacaatcgacttccttgatttgaagccagccgcttttggcatatctggcaaatgaaggccaggagaatgggctgcaggggcagccatgcgcgcaaataggtatctaatttcctctcgccccattgacccgcgaaaaaagaagagatttcgttactctccaaagcatgaaacgtgaaattattcgccagaaaattgagattgaaggaaggggtcaatgtatgttgtatgacatcgacaccgacaccgacaccgacacccgtttcgtacacttagttgccttgggcgaagttggcctgagctcgggtattcttgatggtcttcttgatcatctcctccacttcatcccagtcgctagtatcaatgcggtcgatggtacactggaagtgctcttggatcttgcgaagcatctcccactcgttgcggttggaaacaaatgagattgccacgccaatgcgaccaaagcgaccagtacgaccgatacggtgcagataggtctggtagtcgggtgtgttggtgcgctgaccgccagagtattcctcggggatatcctgaatgcgagaatggttagtttggacgtgaaagcgaactaacaatgaactcacgtagttgacgaccaaggaaactgtagatacatcgattccacgagcgagaacattggttgtgatgagaaccttagcttcaccgctgcggaaggaatcaatcaccgcgtcacgctgggatccctcgacaccaccagtcagcgaggcgacagtgtggccctcagcaaccatacgcttctcgatctcaacggcagaggcacgggtctagagagcggtcagcaaaattccaatcttaatctgagataatacttacccgaacgaaaatgattgaggatccgacagtgagcagtccgtaaagctgaacgagattctgatacttttcctcgtcagtgctgcaatccatgtagagttgtttaatgccctcaacagtcaactcctcgtgttggagggtaatctcgttagcggcaggagcaaacttgcccgcatagcggtagacatgagcggggaaggtcgccgagaacaggacgatttgaacatttcggggaagcatcctattcaggtgaactattagcccggtactttgagtggtggaattagtacttacgccttggcccgaatgcactggtctcccaggccttgctggtcaagcatgttatctgcctcatccaggacaagcaccttcaaaccggtagggttcatgacacgcttcttgatcatatcctgaacagtaccaggtgtgccaaccacaaccgaacaatccatcttcgtcgggcgagcattagaatcggcaggaacagcagttccgataatgagcccttcaaggaattgacccataatctggatcactccgacaatctggcgggccaattcacgagtaggagcgagaatcagagcttggggtgttatctgcgactgctccgttgagaggtcaagacgactaagaatgttgaggacaaaggctgcggttttaccggtaccagactgcgactgaccaaccaaattcttcggaggattgctcatcagaaggggaagagcacgctcctggaccttggacggcttgcggaagttcatggtagagagacctttcagaatgcgcgcatccctggagtgtcaatcaggttagctgtgagactctcatttggacgcgtatcagtgggtagcacttgcaggcctagatcttcaaagcttttgaccgagaacagggggttgttggggtccgcttgcaagtcactcaatttcaccgcgacggtgtagtcaggctcctcgagatctgccgagccctgcgcggggccagaggcgccatcctccttagaaatggtggagacattggcgggatctgtgaaagtaaagaggatattagctatcagccggggtagcgcgttttccggtcgtgtggactggaggaacagcgacggtggcgtggtctcgtctcgtaccggtgggaatcgactcgtcaggcttggtgacacggtcagccaaggagcctgcagcaggggcagtctctggattctcagacattgtgcaaaagtttcgtgggtatctcgagaaagagttggagaaggaaagatggaggggtggtcgtggggtaaagaaaagttcgaaatgaaataagatggctgagcccgcgattggggttaatatggtcacagctgatgatgcgtttgggactcagaaggggataaaatcaaaagcccaagcacgtcgccagaaaacaagagctctctctgaatggaagcaaaaacagatgacgccgaagaaagcaactagtccgaatttagtcaaagtgaaatatatgtactggtattgtaaactattgtaatagatgggcaggacacatactaactaccagcaacgtgtatgtttggtattgtcacagggaccggtcttctccccgccttggccattgaggtcattcttcctatctgaatggcctcaatagccccattgaacacagcctaattggagacattaactacttggttgatactaagacaggtggttcattcacgagcttcgctggtaaccggaaaccccgtctcattgttcggtctcccattcccgcgctatcccatgcgcgtctgccttggaatctcaatcaagccatggcggccgcagatgtagctccgcatttcggagcagagttaaaggtattgatactggatggtgattttgcagatgcataactaaccgattcaatttatctaggattccttcaaaccagttaacagttgggtatggtccctacatcgtttccccgcaaccgacccagatcatgcgcttacagtggagctaatgcaaacatgttgcacaggtatcgaatggtatatcatgggtggacgagatacaccaattctaccgcgagcgcagcgccattgagaaggaatacgcatccaagttaacggccctgtgcaagaagtactatgaccgcaagtcgaagaagatcagtcccttgagtgtaggagatacacccaccttgacccccggctccctcgaaagcgcatcgctcactacatggactacacaattgaacgccgtggaagctcacgccgccgaacgagacaagtttgcccaagaattggtagtgcaggtggcggatcctctgaaacaagctgccacccagtatgaagagattcgcaaatgccatgttgaatatcatggcaagttagaaaaggaacgggaggcagcatacggcgatctcaaaaaagcgaagggcaaatacgatggcgcatgtcaggaggttgaatctcgcagaaagaaaatggagaccgcttttgatcatggcaagggcaaagcacaagcagcatatcaacaacaaatactggagatgaacaactataaggcatggctcaatctactggaggcgcatgtcctgatgctaacttgcggcagaacctctatctcatcggcatcaatgtgaccaataagctcaaggagaagttttaccatgaatatgtccctgaagtgatcgatgtaagatgaatccgccactcccttctcctatctaggatcgacaatggtactcatacttccggtcagggtttacaaaatctcaatgaaacacgagtcgcaaaaatgaacttgatgtggtcgctcgccgcccagcttgaaaagtcatctcttacaaatagcacgcagcacatggctaatcttcttgtcgaaattcctcgcaacaatcctcgtctggactccttgatgttcctccagcacaatgtgactcagtcacaagaacctccaaatctagaatttgagccgagtccagtatggcacgacgatgctgcaatcatcgccgatgagccagccaaggtcttcctgcgcaacgttttgagtaaaagcaaaactcaaatccgcgaactacgagttgagtcagaccggaagaagcgcgaagtcgaaggaagcaagaaaatacgggaaaatattcaacaaggcaaagataatcgaaacgagttagatgtcgtgcggtccattttcttcattcaagaatccttgcacgaggttgattgcaaatgggtcacagccgaggtagaaacggcgactatcattgcagtggctggagatttatcattgggagcccagaatcacaatttccgctctcagacattcaagatcccaaccaattgcgatctttgtggcgagcgaatctggggcctgtccgcgaagggctttgactgcagagattgtggctacacctgccatagtaaatgtcaaatgaaggtgcccgcggagtgcccgggcgagcaaagcaaggaagacaagaagaaactcaaggccttgcggcaggaacaggctggtgccatacctgttgtggatgtcggcacccctacagcttccactaccaccccgtcactgacgcgacagaatacaatgaactctcttagctcaggatatgcggccagtacgactcggtcgatatcgaacattgctacccagtccacagcagaaagcccagaggatcccccggctcttgttgcagaggcaaagccaaagccaactgtcgcagcaaagaggaaccgggtgctagcaccacctccgacagcatacatgactgcacctccgccgagcgacttgggctcgaagcccaaagagccacggggtaagatgctgtacgcttatcaagccggcggctcagatgaggtcagcgtggaagatggggacgaagtggtgattctccaaccagatggtacgtcttttcctaccgtttacacctatatttactaacaatttcacagatggttctggatggctgcgtgtgcgctcaggagccaatgaaggactcgttccggccgcatatgtcgaagccgccccagcaccatcccctgtgccatccgctagtcccagcatgcctgagcgacctgggtcaacgtactccaattcttcttcatccctggcgggaagcgctgcacccaagcgtgtaggaccagccgtcgcgcccagacgtggagccaagaaattgcaatatgtcgaggcattgtacgagtacgaagctcgcagcgacatggagtggaatatgttagagggtgaccgctttgttcttatcaaccgggatagtggtgatggatgggcggacgttgaacggggcggtgttacgaagagcgtgccggcgaactacatccaggaggtgtaggctggacgtctagattctgcccattggtcttcatacatgatcagaacagttgatgctgtctgagcttgtctgtttgtacggcctcataaggtccagccttggtttccgttggtctttttctttcctgtacagtcggcgtcatcagtgccgtttcgtcattgttctacataaggagcattgggggcattcgtgttggcatccattcgcgagtctcggatagagcataggacacgttgtttccattgaatcccatgaaagtcgggactgttctagtagtctgtaagaatgtagaccattactgaagatatacccgtatacccatcttagataacatcaaaccggatcacacggatagcagttctaccaacttttccagtctccgtagtgatagaagtgagttcacggaagatgtatctttaatgtgacatatttctatttccacaattatcttgactgccagacatctagcgctttagcctagtggtcacaaactaatactccgcatttgaattggacttggtccattgccaagtgcggacgacaatagccgcgcaatggatccatagttacgaatctgattagctcaggctgtaaattcgacaatcaactcaagcccgaaatactttccaagtgctatgtacatgtattcttatctccgggggaaattaaggtagttttgactcgatggtgtgacatgcttacgcctacccggtggattcggcgtgtcagcagcttacatcaccttcgctctagctggattgaggactgatcagtctccaggctttggagctagcatagttcattgtagggtacaaggtgacagaggtacttccaagaaacatcctaggcaatgcctcttggcaagtggaggtatgacataaggcaagtcttagaagtcaactccgtaaatccgaacttcctaatccttccaatatcaccacctcgtgaagcaagtttccgatgctgttaatccgtgatgactcggagatatgaagatacagaggcttaactccccgtgccaaggccgctcagccccggcatacgttatcctccaataagcgccaagagggcctcctcatggcccgtcaaacgtatgtaaatctaagctagaccaaaactcaaaataaccttggaaagcgacatataaccaactggcaccccggaaacccgtttcctcggacgtgggtacttagccatcgcaagctggacttcaagaatcaaaaatcaaatccctccacgcgccccctgtttgaccgcagaacataatgctctttcaaccgttatttaccacgatctgcgtactccttctcggcttgctagcaacaagcgcgactataggcattcggccgcaaatttccgggctggacaacaccctcggagctacgattcagacgattaagaatactatacaacagctgccgatccacgatgcagcgtcagtaaccgttcttccccggagatccgaagacgaagatcatgacgcaatacccgggctccacgaaacaacaatagactggagagaggatgggtctgagtctctgagactggaagcagagcgtgaggctggatttctgccgagttctcatagtgagaggtaaaagttgtatccagttgatcagctagtcagtagctaacatggtttgatagttatgactcgttaccgcagttttggcctttgtttaaaatttgtgtcgtttcagcaatcgtaatttgtattcttaaaatagcccgggacttgaggaggtagcaataaaagcaaatcatgacatttatgtttctgtacagcagagttggctttgattcatatggcacatactagtctggccatgctgcgttacatgatgggtatctcatgagttcttcctggaccaaaaaagagatgcgaaaaggggtatgattaagataggtgcatagaattggtttcctatctattgtttcgctctcggatccttctagcgcgaagacccgactatttactttgatagcatagttgaaggaactgtggcgcagggatcgtgcaatcttaaacatctgcaacgaaccattatttgcgacaacaacgtcattgggcaatgagttcgatctagaactttattattttattattctgatctcgtggcaatcacccgaggatgatcgacgatccttccttgccccttgcatcacgaaccgtattgcagatcgagtatcttctccttgccatagaacagtcaaggaacaccaacccctgctctatgagcttgtttcaataatctatgacttcaatggcctttgtcctagcatatttctttcagttccttcgaacaaggatatagttagccgtatttactctcatcctgacggagtgcaatattctgtctgccgcccctagcgcaagataatcaggaacaaaagcaagtatggaacaatagatagccaaagcgcacagcgcaacgttacaccccaactctaaagactatgtaacataagagccacccaaaaagcaggctttaggtacgatatttcaaatactgtggggaggatggatgggtcgtctatatgatcgtcacgggtcggcccttggtcttgaaacgtccggtcctgagtttccattcctggcaataaagcataggttgtgtcacccctgaaactttgtatccggctctgcaggaagcatctcgtgtctgagcttaagctattgaattgcaatatctgatacgtacgattatatcacatcaccattgacctaggcctgcaaatataatcaatgatcatcatcctccgatcccaggctccagggctgtgattatagtgaggctaaaactccatatgtgtgtggagctcgccgatcatttgctaaggtgataattaatgttgaagggatcggcgcatactaggacctgatgcaagtgatcggagtgaggcgtggttacaccctcgatctgttcctgtccctggggctagactacaggggtcacgagtgctactgtgggattgggattgaaccatgaggctatcattctagaaaaagtaaatacatactatgctagtcatgtcgtcattgcgtaagtgccttgcttcccaggcatgtggcttttcttggtaactgcctgaatgggcctgatagtggagaatgggggtctggatttaaaacgtgggttttcaaccgaacgaccttgaccgatatttaggataatacggcgatctccgtacaacgtctgatttttaaaagctaaagtggacatattcggtaaaaagcggactgtgattggtccttgataatagtatgttgtaggcaaaatctgcctttatatacattgacataaaacatgttcgaaaatgaagtaacaagaatagaaaatatgtagccttcaagttaggcttgtggccaatgtgtgccaaagaactccccgctatgatgtcgcttgccaaaaaccgagagggaaagatgcgcctctgagaatgaaatcaagatcaaacaaaagaaaagaaagaaagaaatggatgcgaagtcgtgctcgctaaagccttggtgctgaatgtggctcaaaagagtagcctcgtataagagagaataagatgtcgcgaagtgaatcgttggtcgtgtgtgttcttcagtgaatcaccgagagagtaaaagaaaagatgcagttcatgcagttcgtgccgtcgccctcgaccctcgacgatattttaaatcatctcgactgaggagtcggcgtattctagagacaaatcgacagggtcttccatctggggaatgttagaactgaatgcgaccgaagaagaaaggacaggagtaagcttaccatggcgacgcatggatatggaggaatcatccacaggctgtgtagtgtaggctgcagcccaataccccgtttctcggtaaccggtgaaggtgcagttgctaggattgtactgtggctgcagggcggcaacatgcgggtagagcgttgctaacggtgagagaagctcatctgatggtggtggtgaccgtctgctatcgatgcttccacgagactggaatgtatatgttagactggttggcagaagtaagcatggatcgtacttacgtagagctcatagttggttttataactcataatgttggtagtgatggtgtgattgtctcaatgcaagatgacgagacctagttcaaatctgaatgctgagatgcaggtctcaccagaagcgaagccggctgcatttaaatgtatcggaaatgctcagccgcagcaaaatttggaagcgggggaaattaagacgtcaagatccgcatctaatcgcctagtttgttttcatagataggatttggttacacccgggaactcgggattagatggtctccaccgaaacgtaaatgaaaccttttcattggctgccacgaggaagtctaagcgttagggccgatcggagtccccgatgtgggaaagtcgggatacgaggattgcagtttgcaggatccctgcagaccatgaatcgtggcatcctcgttcgacgttgctgcccccttgcatattcctcttctcgcttccacgttttggttttacccttattctcatgaacatgtggtcctgcgggggggagcaaatatcgtcgaattccgaaatgtaagatgtgatacgagatcccatccccgaaccgatccggactctacctgtttcctatattgtataatgtcaagatgatttcattctaagcagaagtgggccacatgtcagccatgtcgcacaggtcaccaactaagacaatctctaagcgagtatattaaaagactaatgagatcactgatcttccgctagttgtaaggtttccaaatcattttcaaggtgatccagggcgagatagtgcgacagactagccccgaatatattgcactattgataacgctacgccagaaccgctctagatcggccttgggaactgcctattcgggcctagcggacaattccattgtcggttcgggacacagccacacaccccttgctatttgtggacaagcggacgagccacatcgtcggtctcaccgtggctcaaaccgtggctcaccgtggctcaccgtggctagtgaccacatctgtggctcaagcttggtttttgttcgatagcttcccagatccactccaccctgcttcacctcggaaacccgaactagtccgcccttgatcttcacaacttatcgattttgggcacccttaatggctcggtcttccccgtccgctgggtcgcggagctataaggcattcgtctcccccagaatcatgaactattccacaagtctaaatccacctttcgtttgaagtcttcctctttgcgcttcctatatcaacacatgtcgactgtcgaacatgtcactgagaatgcagggttctggaagagagtgctgggaaaactctcatcatatcgacatgcgcgacccttactctcgcgaacaacccgctcaaagtgagttcctttttctcttcacctcccctaccccggtcgtgcccattgcgccggttacaccatgacccatattctgagacctttcgcctttgttccaggatccgtcgaacgagacgctgaacgcatccccgataggcgcgaacgctcccacgacgagggaatgaacccagagacgcagtccatgttgagcgatgccgagtttggtcgcgtggaccatacgggctggttcccccactataagaattgtgttcaacatttcgtggactacagccagcatacgccccaagtgcagtccattgccgcgttcatcaatattcgactaccctgtcagcgacctgagtccagcgcaccggtggaaaccacgtcattgccctttatttcgctgcgaccctacatccgacgattgattgtcaccgcgcaagactcaccgagtgttatgcaaggcttcttcggtggtgactgggaggctggtgtgggctgtatctacaagcaagaacgggtgaactatatgtttacggccaaaagcagtgggtgggcagctaccaagaccgcctacgacatttctccagatgaagaaactcccttcttgaggcccctgcgtgacccctcggaggatgaaattcgagtggccgaggcgcggtggagtgaatggctggcaatggaagattggatggttggagcgcgcagtccctggtaggatagcgcgatcatgaggcacgaatttcctattcttctcttttcgtttttttttttcttatgtccctcgtgccccaaaaaaattacagagtgtgatgtggcccaattcactgagtataatgacaaacgtacttttttttctccattttccatgccatactccgtagggatagttcttccccatagcaatgcagatcatcataagcatgtcaaaaataaagtaaataaagtgcagacattagagttgacgagatggtcctgcgtcataatcgatagtgcaccgccacaggcacagaccagagtgacaaatacttaaactcggagatcccaaatattaatttaataaaattccactccggacgtccgtgattttacaaaagattattctgatatctaactaaccagactcagttagggctatccacctctgactcaccgtcatgtcaggtgtcaacctgtcactttgcgatcaaatcgaggatagtctcttctgcaagttcgcttcaactcgtgtagagatatcgaatccaggttcccgggtacctggtacctcgcaatggcatcgacatgcatctacgagcatgatgcagccacaataatcccagccctcatatctgaactgccgtattccaccacgctgctccggcgaatccagcatggaattgggtatccgcacgagactgcccacatcctggcgactttcccacccggtttagcccctgagcctggacagccgtggctggctgcgcgggtggatctctttgccggccgcacaacacaaatgttcatctactccagtctcgaagcggagcacacgtcaattccgccgatcgccactgtcggcgatagtatcaaagccacgaaaccggagatattaaatgtggactctggatccaataataaccgaaccaaaaatggtaatgatgttggcgcaaaccctgacaccaacaccaagtccattgtttccaccttttccgccaacccgcccgtcctagccttggcccgcgcccagctattggatttgctgtcatatgtcaagaccaaattgctgccatcctatctgtcatatttgcaagccacatctgcggaagctgaatctcttcccgtgtcgacgtccctggtgaccccaaacaccactcccagtaccaatagtactagtagtgttcccctgattgccgcgccagacccacacgccttcctcatcggtgcccttcatacaggtctattctgtctcctgcagcaatcaggctcttacacccaatctgacccgataccttgtatccgggtccatcgcttcgacgatccgccttattacaagtacttcttccggagatcagagttcagccccgatgcagatctaccgtgcgccgatctgtccctcccacccgggtataggttccatgaccgacaggggagggagggtgttctgagtaagcatctagatcttgtgcagagtcggacgcatatccccaggccgaggtcgcagctatctacaatgcctggtatggcggtctattttgatggctctagtgatgatgatgaaatgcctattgcgtggggattcttgggtgtagatggagcgctggcgacgttgcatgttgaacccgagcatcggggccgcggccttgcggctgcattgtctaaggctgttatgcgtcatgggatggcagtagatgggctttttggggctgggagtgttaactcggaggatagtcacactcgagaatgtattggggcttgggcgcatactgatgtagctgggtataatcatgcgagtcggagggttatggagaagattgggggtcaggttctgacgactgtcacttggactgttattgagttgcttgattagcgttttcatcttgggttgtctatatgagtggaagatatataatgaacgatggaaatgagtttatatatctttacacttatctatgcagcgatagctgtcggattttacaataggtgacaatttcaggagtaattctagttctctaatatttacatgtaaatggattctagatgaagccctaatatcatagaaactgcatagttatgttgtaaacactgaacgttgactcacctatctccatcgtccccagatattcccaattaggcttagtggatgatcgggtgattcgacgagatacacgggggaacttcacttcgaatttctctattttcttcatttccaagccattgaccaatctccgttccttcaaaatgagtaatcccaaaggcgtcgctgagaacatgctctggggaggccgcttcacccgtgagtaccacaacccctccatcccaccaaaaaagcccactgactcatacaaaaaacagagggcctcgatcccctcatggtgcagtacaacacgtccctcccctacgaccgcgtgttctggaagcaagacatcgccggctcaattgccttcgcccgcgccaacactaagtccggcatcctcacaccgcaagagttcgccgagatcgagcgtggtttcaagcaagtcgccgaggaatggcaaaccaacacattcgtagccaaggagaacgacgaggacatccacactgccaacgagcgccgtctgggcgagatcatcggcaaggatatcggcggtaagctgcacaccggtcggtcgcgtaacgagcagatcgccacggacatgcgcctgtggctccgcgacgagctccgcgtgatcgaggcccacctgatcaatctgatcaaggtctccattgctcgcgccgagaacgatatcgcctatctcatgcccggctacacccacctgcagaaggcccagccggtccgctggtcccactggatcctgtcgcatgccactgcctttgctagcgagttggagcgtctccgcgaggtgatccgtcgcgtcaataagagccccctcggtaccggtgccctggctggtaactgcttcaacattgatcgtgaggctatggccaaggagcttggcttcgatggcttgctgtacaactccatgaacgcggttgcggaccgtgatttcgccatggagactatgcagtggggtagctcgttcatgctcaagatctcccgctgggccgaggatctgatcatctacagcagtctggagttcggctttgtccgtctgtcggatgcttactcgactggatcgtcgctcatgccccagaagaagaacgcaggtaagtttgactttagtcatgtactatagtagaatactaacatgttccccattagacagcctggagctgctccgcggtaagtctggccgtaccttcggccagatggccggcctgatgtgcacaatcaagggcctgcccactacctacaacaaggatctgcaggagagcgtcgagcccatgctcgaccacgtcaagactgtcagcgacagcatccagatcgcaaccggtgtgctctccacgctcaccgtcatcccggagaagatgatcgccgccctggccccggagatgctggctaccgaaattgccgactaccttgtccgcaagggcgtgcctttccgcgagggacaccacatttccggccgtgtcgttgccctggctgagaacaccaatgtccccatggacacactctctctggcgcagctccaggaagtcgacgcccgcttcgacgcggatgtccagacttgccttgactacgagcgtgccgttgagctgaaggatgccattggtggaactagcaagcgcgcggttctcgagcagaccgccgtgctgaagaatttactgtaaactcttttggtacgatatatgacagaaaataaatgttaggcttttggttagactaaaatgaatatatgaattgacttgtttagatgtctaaaataaaagagtgaacttatatgctgctattaaaggagggatatcatacaacataccagaccattaagccggaactccaaccctaacataaccccgaaaatcaagatcaacccctcaaacccctcctctggggctcatacccattcttccagacggagacttaatatcatgtccaggagctccctgtgccgcctcataagcaggcgggacatcatgaccctcggcagccacaatatcatcttccaaactgcgctgggcaggcctagacgcactgcttccacctccctgggggttagaagtaatgccaccagtttcaattccaagcccagtccctccccgatccccagcatactgcataaaactcataacatgatccgtcccgccgcgctcagccgttctccccctttcgcccagcgcctgggacccagactctccaatttcgataccattagagtatcggtccagattcgcgcctaggacaaccccctcggcagtgacgacccgtccagcctggttccgccccggactaccgccggcgctgtggctgtggctatggccgctgccggtgtcggctgctcgtgctgggcttgcgcgtgaactgggtatagaggccaaggcgggcgattcccaggcccgtggactagtccatgagttgataatgggctgctgtagctggcgttgttggaggggtacgttgatcagctcgctctgggcgtgcgaggctagttcggcgcgttgccggtggaagcctgtgtctggtagctcgggggtgaatccctggcggggagggattgaagcgaagagctcgtttgagtgtggttgggttggggggatgggtgttttgcggggagagtgggagatgaggcttgtggcggaggactcaagtgctaggtctggggtgaggattatgcttcgtgtgttatctgtgaatggggaggcggcgctcgatgagtctatcgatgcgatggcttgtatcagtgatatgttacgctgcctcaatgggtaggccagttagtctgggatgtgtttctgcttactatgtgcttcgctgtctgatggcgatagcgggcctttcatttcggatgcagttcctcgatctttgtaccatgagacaagagttgtgccctcgcgtttcccatgttttctcttgcggcgacagcaacagaaaagcagaatggcacatatgaccaagacggcaactcctccaacaacaccgccgatgattgcgcctaggtttgaggatgtggcacctggggtattggatgaggtattggatggagatgcgctagatgtaacacctgtagattctgtagtcgtggatgtgtcagaatttttagaaagtggcgatgaagtcgccagtgttactgaggatgtgggtgtctccgaacctgttgatgtatttgaagtactataagctgtcgacgagacggtagcttgtttcgacagagtggatgtaggggaagtagtgatggttttcgtcgtcacgctggacaccccagctgagatcgatgagagtgtgtcatcgtcgtcgtccggacaaatcccagtcgtacatggatcagttgcgcagcatccacggaagctgcctgccgtgcagacataccacagcttggacccagtgcaagtagtatcgtctcgagggacaagagaccacagggactcgggagactccatttcgaataccttgaagatcaagtctcattcgccgaagaagacaactcgatcgaatcgcaagacacagcaattacgctggatagcacaagcttgaacgactggaagcgagagatctcgtttcaccgatatttgagaatctgccagaaatgataggtcaaatgggttgtgcctcgacaaatattctttgcaggcggcattcattaactttcgaatggagaccacgaccctgttttctgaaagaagtcgagaaaggattcctttgttggtgcggggtggcactgccatgccaattatagatccttgtatgtttgtcaccaatggggtccaaggctcctgcgcagcagagttgggttttctttagtgcagtagatgcgtctctttgacgcagattggataatacggtgataaatgatcgcagaatctaagaagtcagcaagaaatcagtcgtaggtcaataaacaaggttcgaaagactccaaggggtgttcggtttctttgttgacagaccagggtcgaccccggggattttgagccaaatcaaacaaaaaaccggagttttgatatggacaaggagaaaactacaataagaacctaagacggggcacagaaaagcattaagaagtaataaatcaaatcatatgagacaaacagagggaaaaagcactcagcacaccaactcttcgcctgttaagataaaggaaaacaatatggctatacaggatggtaagtaacacagtcaacaaaaaaatggtctttttcatagatatttccccttgaaacgggggccttgtgacgccacaagccatagttccgtctcgaaactacgaggctgggagggcgtcgatagggtccatctgaaacaactccgtggtatcctcctattctctgcgggtcgtatccaaaatagcgagcttagtagacacgcttgaaaggaggaacagacttgcactccgactcatccaaggtgtgggactgaacgggacggtagccaagcttgatctcgccgtggggaaccttctgccaggagagagtgtgcttcatccagtgctcgtcatcacgctcggggtaatcctcacgggcgtgagcaccacgagactccttacgagctgcagcggaagcagcggtttgggtactgtgagatccaatgttagcaagcgattcctagatcagttattcggagttacgtacgcgcaagtgagcaggttgcggagctcaagagtctccaccaagtcggaattccagatcatgctgcggtccttagtgccgacctgttcgtacagctgatcaaccttgttgatcttctcaacaccctcgtccaagctcgactgggtacggaagacgctgacatcggtctgcatgaccttctgcatagcgttgcggacttcaaaagtcgacttggggccatcggcattacgggcgtggtcgaggtccttgacagactgagcaccagcatcggctgcaaggggcttgtggggctggccagggctggaaatgtcacgaacacggtgagacacagcgcggccgaagacaaccaaatcaagcagggagttggcacccaggcggttagcaccgtggacagacacacaggcggcctcaccgcaagcgtacagaccgggaacaggcttctcctggccgttctcatcgacattgagaacctcaccagtgtggttggtggggataccacccatgttgtagtggacggtgggcaggacagggatgggctgcttggtaacatcaacaccggcgaaaatcgaggcagtctcggagataccgggcagacgctcgtgcaggagctcagcgggcaagtggctgagctgaaggtagaggtggtccttctcgggaccaacaccacggccctcacggatctccagagtcatggatcgggagacaacgtcacgggaggcaagatccttggcggtaggagcgtaacgctccatgaaacgctcaccctcggagttgatcaggtaaccaccctcaccacgggagccctcggtaatcagacaaccagcaccgtagataccagtagggtggaactggacgaattccagatcctggttagggagaccagcacgagaaaccatagccataccgtcaccagtgcaagtgtgggcagaggtacaagagaagaaggctcgtccgtaaccaccggtggcaaggacagtgtggtgggccttgaagcggtgcagagtaccatcctcctggttgtaggcaatgacaccacggcaaacaccatcttccatcagcaggtcgagggcgaagaattcaatgaagtagttggtgtggtggcggagagactgtccgtagagggtgtgcagaagggcgtgaccagtacgatcagcagcggcggcgcaacggtaagcctgaccacccttgccgtaatccttagattgaccaccgaaagcacgctggtaaataagtccatcctcagtacgcgagaatgggcaaccgtaaccttcaagctcgcggacactggcgggagcctcgcgggtcatgtagtgaatggcatcttggtcaccaagccaatcagaacccttcacggtatcgtacatgtgccatctccagtcatccgggtgcatgctaaaattcagttagactcaattcggtaccttccggtgcttgcggtgaaaacctactttccgagggcagcgttgataccaccctgggcagcgacagtgtgacttctcgtagggaacagcttggaaacacaagcagtcttgaatccagcttcagccagaccgaaagcagcgcgcaaaccggcacctccggcaccgacaacgagggcatcgtactcgtgatcctgcgcatgttagactcaatcaaccgcctgtgagtggtagctcttacaatgatagggtacttgtcactcaggtagccactggactccttagcgcgcaaaggctggttggaccatatccgggctggcgcagtttagttagtgacggtgcgttcatgggttgagtagtctaatgcgtacctgcgggctttgaagatgagaagagacgtctttggttcctcaagatgcgggaaacctagagagatcttatgagtatgtcatggccgttgcgaatgggctgaaaatcgttgcatggctactcaccttggaagcaggagctaaactccgcatactcatggagctcataatggcggatcaaacgagaattgggtttccctaaatgaaccgagataatcgcaggacaccgagggtcggtgacaggcttaacaaagaggggagattgtggaatagcgaactccttccagggcgacactttcatctggactcgggttacggttgaacagtttcacgctgacataatcattctcccagttgccgacggggaggaccgggccaaattagccaatcagcagctgcgcaatgaaaatcaacctcgggcagccggttgcccgtgattggccaattggaaaggatccactatctaggtgtgatattccattttgccggccaacacagctgcccggaagtcaacggtagagcgtcatatcacgggatcttgaatctatatctggttatcttttctaactttagtcccacttttcctagtagaatgacgtgcaattgctggatatcgatcattgtggtatctagtagttagatcgagatagtcatgtgattcaatatgaccagttagaatcacatgacaagccgtgtgcattccgaccaaatcaggaaagtatacggactacgtactacattggtagtacacaggttgaaattatattgcattgaccaggaaaaaaactcccatgtaacaagacaatagtgatcgtacatcccatccataatgcaagtgagtcggaatttctagttgtactgcatatatgtagccgtcgagttgaacttgaggttgcccttaatcaccttctcaacggaggccaagaagtccttctcggtggccaccttacggcgagcccgaatagcaaacatacccgcctcagtcgcaacactgcggagttcggcacctgtagcgttggggcacaatcgcgagatcagctcccaacggatgtctcgctcgacggacatgctcttggcatggattcggagaatgttggcacgaccctcgacatccggtagtgagaattcgatcttacgatcgatacggccgggacgcatcaaggctgggtcaagtgtagacggacggttggtagcgaacatgactttaatgttaccccgagagtcgaatccatccagctgtgtgatcagttccagcatggttcgctgcacctcgttgtctccaccagcgccatcgtcaaaacgtgcaccaccaacggcatcaatttcgtcgaagaaaataatgcatgccttcttggtacgggccatctcgaaaagttcacggaccatccgagcaccctcaccaacgtacttctgcaccagttcactaccaatgacacggatgaaggtagcatccgttcggttggcgactgcacgggcacaaagggtctttccggttcctgggggtccgtagagcagagcacccttgggtgggtcgataccgagattcacgaagcgctctggcgatagcaagggcatttcgactacttctcgtagcttctcgatctgttctttgcatccaccaacatcgccgtaggtcacatcaggcttatcttcgacagtcatcattgtcacgctggggtcgatctttggcggcaagggcagcatgatctgatacttattacggtcgacgctgcgaagcctagtcagtacatagaaatgacatataatccgccatataacttacccaactctcatgccttcttcgatatctgtcggactaacgcgctctccgaggttgacaacgaacttggcaatttgcttgacgttgatcacgtatttgctcttgtccgagtccttctcatcctggataatctttgtgcacctcgcgacctgtagcggctgttcctccgccatgcgttgtcgatcggcagcaacatcccaaaggtgtggaggcgccaaaccggtgtcagattcctggtaagacattagctcgagttgttcaaggggccgaaagagctggataagttatcaccttaacgccgatcttctcattcacgctgttttgcttttccttgatatccttctcgagcttcttcagcgcattcgcgtaaggtgcggcgccgtaggtcttgagtactgcgatgtcactgtaataagacgtgtcaatcattgccatcgcgctttgtgtagattgaatcgacacagaccgggaactcactcgtctgtaaggggcgtaatctttttctctggttcctcatcgtctgcgtagttcttcttgaacttctcccagttctcacctgtggcgctaggcatgatgaaaggtgttgacagcccaaggccgagttaagggagggtctgaggaaacaatgaaatcgaagatgtatatgcaggaggaacaaattcgacgtgatctaaagcggtgtcaagttgaaaataagatagataggttgggtattgggagagcaaaggacggtgatgtagcagagctgcggtggtcgagctagcctcactaatcaggtgccaagcttcatcaccgccccagaacctcgcagaatttcctgtgtgtcctccaccacaacaactcaactatctcctttcactcatttttaaaggttaattttgaatatcgatcttcaaaatggcctccgtactagcacagggagccggcggcaacaactccttcaaggtgcgaggcctcaaaacgatgtgtgtgggccactgatttctgattgcatgcaggacaaggagaagccgatggccgtgcgggcctctaacattctcgctgctcggggtatgtatattctcatgatgttaaaggcgcccatgctaacggtataatagctgtctccgatgccattcgaacagtacgcttgctcaaacgatctgcggatacatagatgaggggctaacaggaatatagtctttgggacccaggggtatggataagatggtgagtttatctcggatttttcttctatcagtatgctaatgtctctctagatccaaacggccaaaggacggaccatcatcgtatgcagcccaattcaatccgaacatatcagaagccacaactgaccccccgcagacaaacgatggaaacactatgttgaaggatatgagcgtgatgcaccccgctgcccgcatgcttgtcgacctgagtgcggcgcaggatgtcgaagctggtgatggaacaacatcagtggttgtcattgctggcagtctgctcggcgctgccgaaaagttgctaggcaagggccttcaccccactgttatcgcggaatctttccagagagccgccggtgctgccgttgagatcctccacaacatgtcccgtcctattaacctctccgatcgttctaccctccttcaagccgcttctacttcgctttcgtccaagatcgtgtcccagcactccggacttctgggcccgatggcagtcgactccgtcttgaaggtttgtgacccgaagaccgcagagaacgtggacttgcgggacatccgcatcgtgaagaaggttggcggcacaatcgaggatagcgagatggttgatggcgtggttttgaaccagcccgtgatcaagagcagtggtggccccacaagaatcgagaaggcgcggataggtctgatccaattccaactcagcccgcctaagccagacgtatgttaattcgctcctcaaactgttactggaacaagattgacaattagattctagatggagaaccaaatcgtggtgaacgactaccgccagatggacaagatcttgaaagaggagcgccaatacatgctcaatatggtcaagaagatccagaagactaagtgtaatgtccttctgattcagaagtccatcctccgtgacgccgtgaacgaactttccctgcacttcctttcccgtctcaagattctcgccatcaaggatatcgagcgcgatgaggtcgagttcctgtgcaagagtctcggctgcaagcccgtcgctaatgtcgactctttcactgaggacaagctcggcagtgccgacctcgtcgaggaagtgcagtcctccggtgctcgttacgtcaagatcaccggtatcaaggctcctctctcctcttacaaccagaccgtctcaattgtcgcgcgtggtgccaacagcctgattttggatgaagccgagcggtctttgcacgacgccctgtgtgtcattcgctgcctcgtcaagaagcgtgccatgatcgcaggtggtggtgctcccgagattgaagtggcccacctactcgccatgcgtgctcgtgagcttaccggcactgaggctatctgcttcaaggccttcgccgatgccatggaggtcatccccactactctggctgagaacgccggtcttaactccatcaaggttgtgactgaactgcgccaccgccacgcccagggccagcacaatgctggtgtcagcattcgcagcggtggtgtgaaggatgatatcacagaggagaatattctccaacccttgctggtcagcactagtgcgattgagctggccgcggagactgtgaagatgatcatgagaattgatgacattgctctgtcgcggtaaacgccctcggcggccgctagcgtgagctgtatgatggaaagcgatctaatcgtgacgagtaattaaaaaaaatatcccgttcctgcatagaatcactattggactatacactttctgtgcaatgtatatggtagaccgagatccctgcaatgctatcctcgcaagttttataataaaaagtgagactcagggcaagtatagatatactcgagggtgtcatattgacatgaaagatttaaaattggagaagtatggcctgaaatatatagagcaacactgcgctcaccaactgccatgagcagccaatgataccatggacattctgcagttacattagcgacaagtcttcgtgagaattgaactaagaactatcaatatctaacctaaaatgggcttgaataaggatattagatgctaaacaaatgaatagactctttgtccatgccaagaatggcctcggcctgtttcgcaagattcgccattcggaagccagccctcgaaagaatgacctctgcttttctatacattgtctcagtaattcggcgactataaatatatatacaatcacactcactgtcattgcaacagtgttgctggcgctcggctcgaattgctggcgataagagatagagtgacgatcgacgtcagctccgcctgctaactccgatcgacagccaccatgggaaagttcgaagatgaagggaactcagagtccgtaccattgactcgacaacggtcggaatccctcgcctcacaaatatccaccgactcgggcctctcgatttcctccgagtcatccatgaagaaccacaagggaggcaacacgctgccgatggaggaaggggaaggggacagataccgggatattgaagacggaggagaaactggcgcagatgagcctcttatatcaaaccggaagaaggcaggctcatccggtcgtctgcgccagatcgtctggttactggtgtttctgtgcgtcggtggctgggtgctctctttcgtgctgttcctcacgcagaagcgacccgataatgcggcgctctcgtctgcatcaaccgtggacgtccatgaaccaggcttggctactggtaataccagccacgggaaaccagtgacactgcaacaaatcttgagtggtacctggtctccgaagtctcatgcgatctcctggattgcaggcccgaacggcgaggatggtcttttggttgagcaggacgagaaaaaagacgcttttttgcaggtaaaagacatcagcggtaacaaagacggcgtcgatcatctcgagaccagagtgttgatgaagaaggggtatatttggtttgatggggaggccatcccaccggtcaagacgtggccaagtcctaacatgaaaaaggtcttggtcatgactgacactcagtccaattggaggcactcgtattttgggaaatattggatcttcgatgtggcaacgcagaaggccgaaccgctagatcccgggaacctgagtggacgtgtacagcttgcagcttggtcaccaacctctgatggggttgtctttgttcgtgagaacaacttatatttgcgtaagctggcctctttggaggtcatccctatcaccaaggatggcgacgagaacctcttctatggtgttccagactgggtgtacgaggaagaagtctttgcaggcaacaccggcacctggtggtctgatgatggcaagtttgtcgcattccttcgcacaaacgagtcagcagttcctgaatatcctattcaatacttcctttcacggccatcgggcaaacagccaccgcccggactcaaaaattaccccgaagtgaggcagatcaaatacccgaaacccggcagtccgaatccaattgtcaacctgcagttctacgatgtcgagaaaaatgaagttttctcgtttgacatgccagaggactttgtcgacgatgaaagaattatcatcgagattgtctgggcgtccgagggcaaggttttaatccgagagaccaaccgcgagagcgatgttgtgaagatctttgttatggacacaaaggcccgaactggcaagctggtgcggtcagatgatatcgcagctctggacggtggctgggttgagcctacacagtcgactcgggttattcctgctgaccccaaaaatggtcgaccacacgatggctatatcgacactgttatttatgaaggctatgatcacttggcttatttcacaccttttgataacccagagccggtgatattgaccaagggcaagtgggaagttgtcaacgcaccgtcagctgttgacctgaagaagggtctggtatacttcattgccacaaaggaggctccaactcagcgtcacctatattcggttaaattggatggctccgatcttcgacctctgacggatacatctgcacccggctttttcgatgtttcattctcccatggagccggctatggtttactcagctataaaggcccatcagtgccatggcaggccgtgatcaacacccaaggtgacgagattgacttgataaacctcatcgaggagaacgttgaactctctaagatggtcgaagagttcgcccttccaacggaggtgtacactaatgtaaccattgatggttacacgctccaggtcctagagcgccgccctccaaacttcaaccccgaaaagaaataccccgttcttttcttcctgtatggtggaccaggatcgcaaacggtagaccgcaagttcacgatagacttccagacctatgttgcctccagtctgggctatattgtcgtcactgtggatgggcgaggaacaggtttcattgggagagaagcccgttgcgttgtccgtggtaatatcggccattatgaagctatggatcagatctcgacggccaagatctgggctagcaagagctacgtggatgaaagccgcatggccgtttggggctggagctacggtggctacatgaccttgaaagtccttgaacaagacgcaggcgagacgttccaatacggcatggccgtggcacccgtcactgattggaggttctatggtacgctccttgaatcattactgttcagtttgtttcccaacatgcacatactaacatcctccttcgtcatagactctatctatacagaacgttatatgcacacccccgagcacaacccctcgggctatgcaaatgcctccatcagtgatgtcatggccctaggccacagtgtccgatttttgatcatgcacggtgttgccgacgacaatgtccatcttcaaaatacccttgttttgatcgacaagctggatttgaggaatatcgacaactacgacatgcaggtcttccctgattcggatcatagtatacaattccaccgggcgcatgcgcttgtttatgaacgtaagttgattcccaacgcgcttccattcaatcgcttcccaaggttgggaaatgagatgacatgactaattgtgaatcaaggtctctcgagctggctcatcaatgcgttcaatggtgaatggcatcggaccgcgagtccgaaaccacaagagtcgacgtgaacgcagacttttgcttttttggaattatgtacacccttgggtatatattctactaaacacatatagctttgaattaaggaacaattgatgcatattatgattctgtattctcattaagactaagaatttatgatagaaggactgtagtcgctgaggtatgccacaatttgtcaacacgtcaacaaaattgataccagacaaaacatattaacagagggcttttgaaacatttcctatggttccttccaggaaccaagacaccgaataatgcatgtatgaacagaaacgcgaaaaatatacaggaatgaaatgcagtatgtgcaagtagggtaaggaaggaagggtgtgtgtatacaactcaaatcaagacgagcgactaggagagcgcgcgccaggagaaagaccgccagcgcgaaggaagtcctctctgttggcgacactgacatccgaatttcgataaggaaggtagtcttcacgctgcaagccacgcagctgttcccgaccgacagttgagacggagcgtgcgtaggactgaggacgagagagggtcggacgggcattcagcacagacagccgatgactggaggtccatatgggtgatttactacccggggacagcacggtcgtccttggcgcaaagacaggcagacgagcgaaggactcggtatccgtggagacattgctcatgctcatagccgagatgtcagacatgggacggtggtagccgccgcgactggggatatgggacatggaactgtagacggtggagataccggactgggcggacgagcgccaggagttcaccgcgtcgcgcgggatggtgatgatctcttcgtcgacgccggtctcgatggcggctgccacgtcggcgggctcgatcgggtcgcctgctgcgcggctggccatcatcttggccgacttgccaatccacaacatctgctcgtgctcgcggaggtaccggtcgccactgaaagatttctggacaatcgtgcgggtcatcatgccgagtttgcgacggtgctcgctcttctcgtacatacggcgggtgatggctgtgacttcttcaggggtggggtgggaagtcaagactggggcggggcttgtgtcttcgctgtgtttgctccattcgccaagcatggcaagcatgccgatttgggcctttgccagggcgagcgcgtcgtttggtgcgacaacggcactgaagcgggagaagtcatctgggtcgctgaggactcgaagggaagcaccgacgtcagtgcagacgacgggagctccagtcagagcagcctctcccagggcgagaggaagaccttcagacagagatgaattcaagaaaagccaggtgttctccaggaccttcatggggtcggcagttccgcggagtgtgactctgccacgaagaccctttgatgcgatgatctcttgacactcagtagagtaagtcggagccttgtcaatagcgccatagatgtccaggtggtactcgtcgaacttccactggttgatgatgatatccgcagcgagaagggcagtcttgatgtccttggcataccaaacgtgggataacatggtcactgtcggacgctcggatttgatttccttgaccggagagaacttctgcatgtcagtgattccgttgacgacaggatcgatctttctgcggaaagtgtttcggtgctcaatcgtgccctggcaggtaccaatctcgacctcccaaccggggttgaagaagtcggcacagggaaggaggatgtctgcgtggtgaagggtcaagacggaggtaattcgcatcaatccaagtagcgcgtttcgaacaaatggcgagagcttgcacaaggcagatgacagacagagattggtttcacgccaactgatggcgtgatcccaaatctgcaaggtacagttgcgcttgatcttgcatacaacaccgtaagaggcgctgacactgtgatgtgaggcttggaaggttgaaggaatcttttcaggaaccgggatcgagaagatgaagagatagcggtaccagagctccagggcgacatcgagagatgtcaaggtaggaagctcagtgtcgaaccactcggatgacgggatggtgtttggcatttcctgggtcagccacaactcacgccagctctgtttcacaatttcagtgttccacacctgagtccaatgacgggactcctggaagtatgtgttcagattcacaagtgctcgagtcgcttggtggatatcagccttcgagagatgaactgcacgggcacccttaaccaaagctgtcagaatcggaatgaagttcatcttgatgtcgtactcgctcgcggaggtaacattgtccacctcagcatccagcttgttgtggaacaaaccgtgagttggagtgaggaagtccataccccaaagcgggatgagcttcagagactggatgttctgttcggtctgatgctttggaacaccgaaatcgttggcagactcgcaaatcatgtgccatttgatggttcgcagagagttaatcatatctcgtcgacaggcagagacaccaccaccttcattaggccaggtaccgttgtcggccgccatgacatggagcgtcttttcggtatcggtgccaaagttcttggagcgagtgttaacaacagcatctcctccagggccaaagttgagcaaatcggtgagcttaacggcgagtggggtccagctggaaatgttgtcgtccagatccgcactggccatgatcgcatcagcgcggagatccacgtatttctttgcagccgcgagatttccccagtcacggctgcgccagtaagggtgaagaaccttatctctgcgcaggatacggtcatccatccagcgaacgataattgcatcgaagtcaacacgatccttccacgccttccacatcaaggagcgagctcgagaagttgacataacaaagcgcttcttcgtgaggcccagtgtccgggtaaggaaagttgactggagactatcgcagtaaacaaaggggttatcatgcacaaaactggtatactttggcttggagagtacacccagataatcgtgctcaatcatcggcggagtctgcatcttctgcccattgatagtggtaaagatggtgggatggaacttgtgatcatacaaccaacgactttcataaacatcggcgccttggacaaagctggcctcggttaccttggagtgaggaatccagcgttcaaccttctcgggatggcgacgcggaggcgcacaccaagacacagtacagctgatgtgggacaagacaaattcggctcgcaacagttcatcaccgaaacgggggttcttgcgatagtggtacttgaagcggataagattgccatccttcatgtacgaaccagattcgataagacccttgcggttgtactggacgctttgcagatggttcgctcctgacacgcaacgtcgtcctagcggaatgcggtttgaggatttgctaagtttgaagctcttctttgtcggagatcggtagtcgtagtggtattcgttgatcactttgccgtccttgaactcctgcttgaccagaagcaacatctcacccgaaaaggtactgacgaacttcagggatttgacctccttgggctcagtgctatgctcgccagcgtaatggtagatcttgaaagtgccatcaatctcgtggtgcctgaatgctgtaaaggtgccgtcctgactctggacaatgatccggctctttttgatatggatcgtcatgcccttagtctcttcccacagccgcttgacatttttgcggccatggaagaggaagaaggacaagcccaagtcttgaacgagcttggaatagacccagaccatattcaataagaagacggttggcacacggacaacgctcggaaggtccttggtgacatgattgaactctctctggaattccggatctgcgactgaagctaccacacagaacttgataattgttcccagcttgtggtaaatgtagctagctggtgatcggagtagcgacaatgcgaccgggagcttccgaggtatataggaaatgtacttcgaagtctcggatactttgggaagagcggtttctccagttccccagtgagcatagtcgagaatgctaactgcagtggctgcaccaagattgcaacgagcaacatggatattgaggtcatcagtatcgaatgtgcaaagatttcgctggagccattggcgctggctattggaaaggctgcactgttgacccaagcaacgcttcagcagcacatcccgaacctcgtttggcagcttgtcccaatggagatcagcctcgaagccaaggcaaagctgccgaaggagttccttcttagcccagcatacgaccgtatgtgtgttggcctcctcacgaagctgtcgagccattgtgtgggttactccaccggagacaatcgatcccgccaatgatgcatactcatgaggaacgcccagcataagctctgtgacggcatgaagcaatgtttcagcaataatttgacagtttgcgctgatatcgagacgctcgtctaggagccctcccacggtgatggccaacttcaattggtttccagtactgcagctgagagctcgaatgccgggaccgagagagccagcagaaacaagctcgatgacaatgtcgcccttctcccatgatgagatggcggtgttgataatattcttggagcaggggaacgcctcttcgatcctaagttcttctctgcaagacaacatagcattcttgatttcagcaccaggatggacacctggattgagcctgaatcgggaatcggaaggaagcagtgaatagctttcgaagaaagtctggagctcttgctgggaccattcggggtccgaccagggtgtcgtaaacgcatggaaagtgcggccaagttccaccggagagtccactttgtgtggcatacccattttggcattccaaatcgagaggaaggcaacagtccaggtagcagagccgagtccaatgatctgcgagtacagcgactccggccgacagactttgagcgcgataccgattggcaatccgacacagataccaatgatgagaggtttcagcgcatgagggccagtgaagatctttgtgtattggtaccagatcaaaccagtgtaggcgagaacgtaggagaagaaaacaatcatgccttcaaccggagtttggaaggtccaaatgagggcagtagcaagcgcaagactccagacatgccacaagaggaatctgaaaaggacccgccagtataccttgcgtctcagttggatctcttgtttctgagcgagccgaatgtcttttgcagatctgacggaaataggagctttgctaccgagggcatcatggagctcctgggctttggtatcaataagcacggctccgatcaaatagtaggcaagggcgaagccaacagccattcgattagcattattcatctcagcagtgaacttaggatcaggcaacccgctagggaggagaccaaccatgcgattgccactcagcagttgtgcccatttgtcaagaagcgcaagcacaaagtacagaacaccacatcccatctctttgctcgattgacgccaatgaacaaatgcgttgtgcagacgaagacctttctgagagttacgcagggtgtcaagtgcgaccttggtttgaatattccagccagaactgaacggaatcggcctcggaacatctgcatggcgacaataccagtcgagaaggaaattggttgactcccagtcccgggcaagctctacgaccattttatctttggatgtcttggagaaagttccacgctttgtctgagccaagacgtccttaaacagtgcttctctagccagcttgagggcagccgggtcactcatgttcgcgaatactttctcgtcatcatttccataggcagtgagataccacttgcggatctcagtatcatcggtgcggcgcacggattggtaccaagtgacccattttgaggtaaccgaacgaagagagagcaagagcacaccaatgaagacatagataacggcgagatagatagccgagtcgtggccagtccaggtcgtgatgatcggcgacacgaataggatcggaatggacataatgattgacttgcgaccagacaagaaagacgtaccagggtaactgaagcttgcaagggaggcgaaagtcgagaagtaggttgtcagagcgactaggtagaggtagaagacgataccagcgcgaggacctcgaacacctgaaatggcaacgaagccgatcaagccagcggccacagtgaaggcaataccagcgatcaggcgaatgagaacgaacatgttcgctgctgcaaaagccatcgaaatgaggtagtacgggccaccacatgcaatccaggtaccaattacaccggaaagcagcagagcgatcatcagcgccatagttgcactgtcctgttcataatcagtcatggcagcagacagatagagcccacggccaatcaaggtaagcaagacaatatcaatcagagctggaatagcgaagacactcaagaatgtgaattgctggtatgcaggcataaccttaggcttatcatcggggttgacatcaatctgagctccggcgtaggatgtagcgagctccggagcaccgttaatccagtttggtggctgatggtctccatagtaagctctgaaccggtcggatagcaacttcccgaaaacgctgggagatacgtcgaagtatgcttcacatcgcgatccaagggcaaatgactctgcgaaggcggcggcctgatcggtatggctgttgaataggggattccgatcagtcacttctgtgtaaatctcatcgaaggctccctgtcttgcggcactaaaaagcgcaagagccatcatatccacgtatgcgtcaacggagccaccttgaagaagcgagcagagaccattggtaatggcggcaaggtcatcctcacggcggtaccgcaaaacatcggagagcacactgtcggcctgatggaaaagatcaagacagacatcgagagatgggtatgtgcatccttgatccaggtaccagttgatacgcgacctgatcaaatcatcaggaggggtagatttgctgagatacccaaccgtgttcagtgctttcaactgagcaaaagaaggagcatctaccagttgcttgcgaatgtatgcgcagatggctacagatagctcgctgtgagaatcggtcagagagaggtgctgcaagagaagtaggcgctcttcagggctgagaacatcgatatcttgtatcagtcgacggggaaggccagtatcgcgagacacgtcctgggaccaggttgcgaaggtcgcctcagcctcgaggcaaacatgccgagggaatccctttgccgagaggaaggtgtgaagaatagttccagccaggccttgcgcatttttggacacataaatctcgataccatcatgatccatatcgaaaacggcccaaaatcggacatcggagctcttgcgcagaccagaatctagacagagattcacgtgcaactgatcattggatgcccagttcgaaagttccttgatggtgttggccaaatgttctccatcctcagagagatccagagagtcatagaatttactcaaaaggactccaatactttggattttgggtttcgggacgggatgaagaagactgagagacttgagacgttgttgagattggacgatttctgcaaaggccagtggggtcgcgtctgaaccgagagggaagcaaccgagcgagttgtaggccagccctgacatggagatagagagaggactgccctgcgacttgacctgtgcaacccattcaggaggatcacgcaggcgaccagtcgggctatcgggggccttggagtcgtattccgatgacttcagtagcgcatcaatggcagggaaaagtggcttgagaatatcccagccaggcttgttatccggggaaggcattatgttcaggttgccacgccaggtatcatgagctttcatcatttctgcttccttcaaccaaccgaacgcgggaagaggttcgagagtcgcgacgttaagatccgcattgtgaagagcagcttcggtgccgatccaggtaattgcactgtaaaaaccgcaccattggatagacctgcgcactatggcattaggaataatgacattatcgtcgatggtttcccaggacatcacgacaaagtctctcatgcaagattcagaaacgaaagccttgagtgttggttggagtgcgaccatttggaaataatcccgcttttcgccttcaggcatgatgctagcgtttcgaatgaccaaacccgccacggcactgctctgaacggcctttcggtctttcaagaaatgcggtggctcagtttcgagatagactgccaggccgagaccgctgatggcctcgaggagctttctgcgagcggtaggacggagcacatcttcccaatttgcgaggagaacaccggaaaacgcggtatcatggaatccgcttgtgagcagttcctcgatcttttcgatgacggccaaggctgatggatttggaggaaggattttcccgaaatcaatacgtccgagtacccggctgcgctcgtgtctggaaatagctctggcgacacctgactggaatggatccacaaccaagacatcccattcttgcaaaagtctttcttgcgagacggtaggtgggttttcgaagcttcctaggtatactccgaagctcgtgggcttgcccgcgcacggacgtctctcgatcaagttgagttctcggttggctagctgggcgatacggttggatacactcgcagggaaggtgtctggtagcggtctcgactaaatagactggaattagtatatagagcagaggggaggagcttgtcggtgttcataccttatagtatttgataaatctccttcctccggaatatacaattgaggcagagccaatggcgactgtacatatcaacactccaatgtacatctaagggagatggtcagcatatctttctttgtttctcaacgagagcgccaaaggtcaagttgtaaagaggaccaggatcaacatacgaattgccaccaatgttctttcatgccattccagccaagaggatctggcttgaatggaagatattctaccatgacgtcgggaggttgagtcctcgactcgatgtgtctttgagcgcaatataagaggcacgaggttagaataaccggccaagtggagatgcgacttcaaatgcaaatgcttataatgacatgcttaaacgagtgactgctgtgttcagcgaaaagccaagatgtcgatgtcaagaaaagagagcaccggggagctcaagtgtcgacaaggtgataaggtaaaagattagtgggggaagaatggctaaagtgaatatccacttctccaagccgcatcagtcaaatacaacaagacaattttgcctcccaggatttcccttgttcaattgtcaggggcaggaaaaacggaaagaaaattaaaagaaaaaatgtgtatacggggtagcttcgcctcttttggaccgtttaggatagaaaacaagtgtctaggcggttagtgaggtagagatctctgaaaggcaaaaatagcacacactaaagttttcgaacgcaaaagaataagctaacagatgcacggctggctgaccgatggaacagacccggtggagccagcgtagtatggatagcagatatgttgccatgtgtgccaaagccatgcgactcatatcgtggcaattatactacccgatgggccttggctgtttctcccactgtgttccaagggtctaattgaacatatcatatcaagaatgaatatgtcgtgtttccctcgagatgtatcggatttcgcctagttagtttgtagggcagttatgcacgggctagagcatcatatcatttcagcgaacaaaactcgatgtcttggcaaaggattataattaaaataattaactcaaagacggaaaagaaaataaatagaaaagattagaatgcaaaaagaaaaggaaaagaagaaaagaaaaaagaaatacaggaaaaagaacttgaaacccgaaatcggacaatccatacggtgtatgaaccggtaaatgaaaattaccccgtatctgcaagaaaccacgtaattacaagtatccgagtagcccgaaataccgtatacgccatacacacgctgtaccccgtattcagctcagacatgcagtgccttgttcttccccttccccacatcaagttctggacttgaccagtctgttcccctgaaggtaaggttcgttcctcgggaataatgcaatgtgttgtcggatcttttagccctgctatggagttcttcatgtctcgcttaccttcaatctgcctagccttgcttttgtcttttcttattattatttttagcccaaagtcgaaacaagaagcgaaaacgagaagagatttctccatgtctcaaccaatccccaatagattccattcctgaaccgatctcaggccccccggaaaagattaaacctatcaacgccagatggagactcgtataaactggatttgccttgagatccatgcgagattactccgtagctccgggattaactaggcacaattggcgataggccttggattgaacctcccgttttactccacaaacaatatactataagagctgatgatcatgcacatgtgggtaaagagctgcaagctaattcattcgttcattatcttccgtattctattttcattttctcagctgtcagttgttaattgcagacctgcatactgtgtgaccttccccatctagaaataggtcaggatcgtcatggttgccgtgccagtctgggccttgaaggtcgcatgctactacgcatttataacatgcgacactgcccccggtgtttggcctgagaacaccccgactgtcattgcctatcatcctccggtctcgactccttctagtacttctagcagtactgctgaagtgagctccactgcggtcgctacttctacactctcgttcacttcctctgcctctgtcccggctctgtcctctatcgttactggcagtttgcccacagttgcaccgaccaccactgcagcctccaccttcgttactttcaccacttcgagctcaatcgtcgactctgcttcggcatcagtcactgtcactgtcccctccggttcttccagcgtcctgactcagagtgggtcgtcgtctgtttcatcggcctcttccagctctgctgtttcgtctgcctcaaccgttgttgccagcagctcggcttcttcttctcctgtttctagtgctacttcaagtgctagttcttcgtcaatcgtttcaccgtctgaaagttcttcagtcagctcgcccgcctcgtctactgttcccagcagcccggcttcttcatcgcttgtctcaagtgtcacttcttcatcggtagtttcatcttccgcaagctcttcggtcagctctacctcgaccgctgttcctagcagctcggcttcctcgtcagctgcttcaagtgctgcttcttcgccagcagtttcgtctcctggaagctcttccatcagctcagcctcaaccgctattcctagcagctcagcttcttcgtcacctgcttcaagtgctacttcttcctcggtgattacgccttccggaagctcttccgttagctcagtcgttgttcccagcagctcagcttcttcgtcacctgcttcaagtgctacttcttcctcggtgatttcgccttccggaagctcttccgttagttcaatcgctgttccaagcacctcggcttcgtctgcttcgagtgttgcttcttcgtcggcagtttcatctcctggaagctcttccatcagctcagcctcaaccgctgtttctagtagcttggcttcttcgtcagccgtctcaagtgctacttcttcgtcagttgtttcgtctgcatctgtttccacaagtgcttctttgactaccccaatcatgtcgtctaccctcatctcaatctcggcttctgcaaccgcaagtgccactccgcttagccatgctgccgttgcagctgaaattctgattattgccagagatgctgcctctgctggtgtggccagctctggtctcaatggatacggtatcccattctccactctgattgttccctctgctggtgtcgaacttcccgaactcaatggtaccgccggaggaaacttcggtggtattgtcgttgcctctgaagtcagctatgactatggtaccctgggcttccagagtgccctgaccaccgatcagtggaaccagctatatgcttaccagcttgaatatggtgtccgtatggtccaatacgatgtctacccgggtcccaactatggcgcatctgctatcggcggatgctgtgacggcgttgaacaacttatctccctcactgatactagtgaattccccacatctggtctgaagactggcgcaggtatcagcaccactggtctatggcactaccctgcgactatcagcaacaccacctcgaccaagcagtttgccgcgtttgcccccaccacaggcttcgagactgagagtgtcgccggtgtgatcaacgacttcgatggccgtcagcagatggccttcttcattggtttcgacactacctggagttctacatccagctacctgcagcacgcatggatcacctggattacccgcggtctgcacgccggataccgtcgtgtcaacctgaatacccagattgatgacatgttcctcgagactgatatttactcgcccgctggtaccaccttccgtattcgcgccgaggatttgaccaacattgcctcctggattgataccatcaatgccaagttgcccgctggcagttcttactttgttgaagtcggccacaacggtaacggaaacatcgagaacgcttccgatacctcggatgctggctgggatacttgcggagctgccatcgagtatgattcgcctttggacactcccctcgagtggatcaagcctcttggaactggcactgatctgtggcccgccacccctactgcttacgactgggaagctacttgcactgtcatggatgagctcctggcatggtggaccaccgaaagcaacctcaacaagttcggccacatctcccacactttcactcacgaggagcaggacaatgccacctacagcgatatctacaaggagatcagcttcaaccaggcttggctcaagcaggtcggtatcgacaaggccaccaagttcacttccaacggaatcattccccctgccatcactggtctgcacaatggcgatgcccttcaggcctggtgggataacggcattgttaactgtgttggtgacaacacccgctctgcccttctgaaccaggagaacgacatgtggcctcttttcacaaccgttgccaacaacggtttcgatggtatgcaggtcaaccctcgttgggcctctcgcatctactacaactgcgacactcctgactgcaccgtcgcggaatggattgccacctctgctggtgttggtggcttccaggacctcctggacatcgagaaggccgagactatgcgtcacttcttcggtctcttccacgatccttacatgttccaccaggccaatctccgcaacgctgatgttgaccccatcaccatcaacggtgttgctgagaagtactccattatgcaggcttgggttgagacccaggtccaggagttcatccgcctggctgaatggcccgtcgtcaccctcacccaccaggaggtaagataaatcctatccaatacgctacaattcgtttcatgtgctaaccttcatagatgtctgctgccttccttgcccgtttcaaccgtgacaagtgcggctactctttgagctacgccactagcaaccagaagatcactgccgtcactgtctctgccactggcaacacctgcactgaccctatcccggttactttccctgttgctcctaccagcaccctgggcttcgctaccgagcagctcggtgctgaccctctgaccgtctgggttgagctcactggctcccccgttactttcactctttccacccccatttccttttaggatgtttcaaagatgattgaccagtctgccttcatttgacaggtcgatgcactttgcatcttttggcttttgttgatcgtccatcgctctcattcatcttgtggatatctctttagatgtcaataatggtttttatatatgtgaaggaaaaaacagcccttgtctttctgttgatacgaatattgaatgtcctgtattttaataatgcctggaaatatcatgtatactatatgatatacaatgatgctttccgaatggtcttcatacttcagtagtgtacaatataaaattagggctcaatctgtgcagagtagtaaacatcattcttcgtaaaaagcaacacaagcacaagtcctcgcatcctcggtactactctccgacatgtcatctggcggtctggcggtgccatcaataattcgcgctgcaggtccggggtgacaaagtctgcaacggttatacgagccaagggatttcctgatccgactgatccggcgcaaggcatggaaaagacttccagcgcatttcgcacggtcatgcaccccataccccaaaccaagaaaacccaaaaaatatgatttccacggatgagactaagtccaaaatcaaatcaatcgatcgtggcaaaaacaaacatccatggaccccgtttactccatacggaccagcccaagcaccagaaagcacagtgtagaaagcaggtttagagcctaacttgtctcacaaaccactctatcaccccacccaaccgaggacgccatccgggcaatcgatctggtgccaagtacactcggaaaataaagatcgtgtctcagaagccggaggggtccggtggatgtaaactagtgtaaacgcaagtggctgctgtaaatgtctgagatataccggtacgcacagagtatattcgaaattctacctagatcgtattcctgcggggtgaaggttgtagggttggcatggggcaatgtgaccccgtcatcagggtccagacctacgctacagcggggaagcatagatgttgtattttgtatacgaggggaccaatgcagccgttgcataggaactactcgattgggtaacaaggaggctcaatactaattttggatccatggatggcaccatttcggtgatatccgcttgaatacggagaaggttcctgggcattaagccacccggtcacggatttaatgtgctttagtccgggctccgtactttggactttgtgctggggtcatgtagtgatcaagaataatgtatgaataatgtatgttgtatgtcatgtaaccctccctgcttggatgaatttgggttttggagctcattctgacttctgctgctactgttgctttcgttcttttattcctgactatccctagcagcggccggtgccaggggcaaatgttacgatagatagaatgcgctagaataaaaatcccttagcgtgtatgtattctaagcgagagatattgacagagtcaccatttgatgacttgtcaaacagcgaacactggaaacggttaagcgcgatcttggcaagggctcgaaatttctgtctcgggtgcaatatagaaacgagactaacgatctcgggacttcgtataaagtcccgtggacctgtttcggttagcgggtgtggcgtccagagatttgcgccaaagaaaaatcaggcgatcgggttacatctggactagcgccatcggttgtactttttctctggtagtctattttagcgtcgaaggtggagagagcgggtcatggaggacgattcaacaaaaaaaaagtccaattcgaaacatccaacatagaataggcaaacggggtaatagtaacaatagcattgcatgatattatgggttactaccagtgttgaatactcgaggatagatgcttcgttattaaactagatctgcacataagcgtcatgcagagaagatttcaaagcatcagatgatagcccaacaggtcggcactagggtttttaaagtgactgattatcgctgtcagaagtttgtccactttagttagggctagctcgatacataccggcatttagggggatatctcgggttggtatttgcaaacccgtcttacctcggattggtaattacggggataaaatacaacaataccattttcgtgacaaaaaaaactcaactccgatttcgcgattctagactttaacgctaaggggcttgccagcacatgcatctatccgcttggtttattggcaatgttctgggaacactggaagcgcagggactttcggtctcccctcgaatcctgatgctgtccactttgtttaatgtatacaacctacaacatatatggaaataaatagccagccttggcagaccgagacttcccttttttcccttcatctattttaggcgacagatcactctcttcatccatcttggcaatttaaaattggttgccaacccctaactaagcttccatgggttgccattatctcttctcgtatacggtagttcacttatagtgtacagtaagacgatatagatcgcctgatcacatgagcagatcagatcagtaggttccaccggatctttagttttcgccccttggacttttccagtggagtcctgaccgccctcgccctctatagccctttaggcatcctcgttttcctaccaattgatcaccacctcccttgcccgttcgagtattttcagggtcttccgtccattttctgccgcgatccaaggctgagctttgcttataacgtccaggtttttccgtaccctgggagatctccaaccagcgctctgggcccttgactttgagcttaaagatgcctatctcccgaattagtgcctgctgatcacttcgtctcttcttttccctccttggccttccccatacaccttcattatatacaactaccccgcgattttgggttatctcaaccttattacacactaaatttctctcgttttatctctcatttatctctcagttcacagtccaccttaatcggtgaaatgtcgtccaagacgggctggtgggcttggtccaccaagaagaaggtccttatccttggatctatcgctcttgtcatcattgctctaggtgtcggtctaggtgccggactaggagttggtcttcatcatggcgaaggcgatgataatgataacgacaacggcggttccggcacaggttccggaggcaccggttccaatacgacaacaccaacaaacacaaccgtgtggcagccagctgttggcaccaagtggcagattatactaaaggccgacgatggcgaaccagtcaccacctcagtggacgcgcccatctacgacattgatctgttcgacaacaacaaaaccgtcatcgccgctctccagaaaaagggtcgcaaagtgatctgctacttctctgccggctcgtacgagaactggcgtcctgacgccagcgactttctcgcctcagataagggcaagaacctcgacggatggcccggcgagaaatggctgaacgtctcgtcccccaacgtgcgcaaaatcatgcaggcgcgtctcgatatcgccgtgaccaaaggctgtgacggtgtcgaccctgacaacatcgacgggtacgacaacaccaacggacttgatctcaccgaggcccaggctatcgactatgtgaactggcttgctgcccagtcccacaagcgcggtctctccgttgggttgaagaacggcggaggcattatcgactctgtcattgataacatgcagtggtgcgtcaatgagcagtgtgctgagtacgaggagtgtgatacctatgcggccttcattgaggcggacaagcctgtcttccacatcgagtaccccaagggcgatagtaccaacaataacaagtccgtgacaaccagccaggcgaatgctgcttgtgatgccaacagcgctggcaatttttcgactgttatcaagaacatggacttggacaattgggttgaatactgcccttgaatattggatactgttcgtgaataccgcctgtttgaggccttgtgcagagtgggctcgtcatctaatttggagtttgtcattgcatgtataagtactagacgtgatactttcggcatcatcattcatagcttccatcatatttcagcgtgtattaattggtcttgagaggtgaaagaagtaaattggcaactagtcacaaagtacacgcctggacacccaagaacccctggaacgcactcgtcatgtcagcacatatttcacgaacagcaccttccctccgtgtcaaattcatcacataaattccatcaagaccacgccatcggctcaaattgccttcggatcacatcaccctcaatagacggcaatgaagtgcaccacacggcacagcaactcacaagcccaaagaagcgaaaccaaaaacgccattttgagaacacagcacgcccattacaatagtccagcccaacatgagcacataatcggcatgttctacctatttaagcccgctagcctcagaacagtcacccgacatcccgagttcccttcccgaggttttcccaagatagtactatgcgctgtctccgtactcagctcctcctcacccactctatcccagctcgcacctgctctgggcaccggctctaaataatcaccccatctcaaagcaacgaccagcagcgccatcgtcggcgactcctcttatttacagccactgcatacccataagcaatagtctgcagtggctgtggctgtggctactgcgattagtggaatattatctccgggtcttccgtgcgcccgggttattcatggcgtgacatgatggagagattgggcgaggttactccgtactttactttactcaggcctggcttttgtggcggatcagccatccgtcaatagcggttatttttctttttacttacaacacggggtatcggacgttgtttatggcggaagtgttgaaatacacggatacatatacgtccgacccgaataactagtatgtgcatgtaggtaacagggacttgattccagtcctattttttccctgcatcttatttcgccaccgtatgtataattagagactagtagttcgttgtttctagactctggagcaaacaaggcaattaattacaaatacgctcttgtctaattggcctcatgaaacaaatcgggcattttagcgcactgggcgggcatgggatttcccaatggagacggacgttagattggtcttggcggtcttggcacatgaatacatcggagcgggtcgaagcgctagattgctctgattggttaggtttgagagttcattcaatattcagttaagttcgggtcgagcccctggggaagtggatcatccggtaatttttcgatcgtgtttgtgtattgtggaaattttcgaagtttcattacatacatacatacgagagtgttgatatcgttatttacgggtattttatgtgtcaacaatcagccatcgagtttattttccgccattgatctgtttgaggctgtgctacttatggacatatcataactcaaaaatcctaatgggggatcccttgcataagacccctgtggctggaacttaagtcacacgtagcgtgctactatttgagataggtacgttgtactatttttcacaatgtgctatatttcataccaattgcgagaaagaaagccgaatagtccaggatccagaatccaaaatcaagaatctcctccgcaaaggcgcttatctctagcatcaaccacattttgactgggttcgcatagaaaaaatttgcatatcgcacggccgatctcggtacttggtactccgtactccgtcggtgaacacgaggatactacagctccccagtccccgacgctcactcccgacgggaataacaatatcaattggccagtaatacgctccctttcggcctgtttttttttcccctctccgaaactggaacccggtccaacccggccagaacccacgtgtaggtatactatacccgcctaccaataacgcgcgaaccttggaacctaacctgtctcgcgcgtggtgcagcagcaagaaccaagggcgctaagatcggctacccgagtggctcgcccagataatagatctaccccttgttcctgagtggctgggtatttgtacctgtgtgtatggaactatgtgcaccctccacttgtttacattgatgtctatattgtactccgctctgtgcaaatctctgcaacgcgacccagggctgctatattaaaactaacgggtggcttgtggcttggaagacgcaatgcctcgatttggtaatgggttatactaagcgaggatatatattcaagagatgactgccttcgacccatggttgaaccaaactaggcatgaatagcctcgattgaaatgcgcgatttgaatcggtggcttttggaaggaccaaggcgcgcgccatgcgagctgaacctcaaactcggatggagacatgtatggagacctggatggatatgctggcgcgaaccgttcggaatttatttgttcagattcggaccgtgtccacccatgcatgttcgtgtagctgatcaagccgcagccaaacccaccgttgttcattagttttcccacttttgtgctgttagcgcccccagcgatcgactagttctagtgccaataatgcaatttattcagatctagctcctatggagtcgaacggccatggaagacaggactgattggctatttctctacagttttagtcagttctccccagcggctaccgggcgcaccgtagccaagagaggggatcgaaaaaaaaaaaaaaaaacctccgaaatacccggccatgccacgagctacgtatgtagttagtggcttccgccaccggcgctcgggttcaggggtatggctggagttttacaggtacggctgaagagcaagggtggggtgggcaggacggtttcccaaaactgcttctcggaccgagctaccagggaagaacctagtttctccggaggcggagatgcacgcaaaatcatctctaggcagaggatgaatattgctcgtcactgtggtattgtacattgcgccggggaccggggcgggggacggtggaaaggttcattgaaattgaaattgtcagccatgttgtcattgatgtaacaacatacgacagcatggttcctggaacatgaccccgttggtataggacaggtcgggtttggaattcggtatagccgcagttgcacacgttaaacctgcagacggagccctctgtacgttgctcatgttccaacgcagcgttgtatccggggactgagtttgccctatgtatagcgatgatctaactatgccaacggtaaatgctaatacccgacgtctgttgtctagtctgtctcactactgtttcagtccttggtctctttacaccatctgagacgattacgttggcttatattaatagctcagttctgtctcaagatgttccagttgaatatatcccaaacttgagtaaagcacgatgtccctcgttaattgaaacgttgtgtgttgcagggttattttgggagtatttccgggcttggatggcattggttggcctacaagacgccatatgcatgcctcatctcatctcatagatcgatcggatgggcggtaactcagacaatattccaaagaatcgaatggtctaaatcgagatccagaaaaggaaggcgtttgcatttccttgttgtcatgctgtcatgttgtaaacgttgtcaacattgaagttaaatcaagccacatcaggttgagccacgtttaacctatacggagcactctatgcctcgtatcaagctggccctacaactagaacccactctcggattttaatatatccctatactccgtgatccaaccatacttttgcgttgccacatgtttcaattgacaggtacttgattagtggggtttagttgtatccatggtattgtggtattctactcttggcgaaaggccgaaaggaaaagaaacagaaaaataccacaatacatactggtaatgtattacccacctgactccaccttgacctaaaaagtatagctcagctcacttcaaacaaagacggcttgaaaggatagacggggaaagagaaaacttttattagatggactaaaatgtggtctgaaaaccaactcgtagaatcattaaaccaaatgagtgaaaacatgctagctatccccaaaaaatatgtgcacatactcgcttgatccaatttacatcaccagtgcacatgaactaaagcaagtaatccaaagtagaaatccaaatcctaagctgccatcaggtcgacgaactcagtccacttagacccaaaggaggcataatagttcgtgctcagatgggtgatgtagatctcatccgcgacctttcgcacctgcttgaccagactgcgaagatccttgccctcgaccgactcaggcaccgagtggacgatggcgcaaagttgggtacgattgctgtccgagatgctgctgaacagcttagcgccttgccgttcccggaacgtgctgtaggcggattcgaacacaacggttgaatcagctgtagccaggtaccgagaatccgggacagcgccggggttatggacaacctgatagttttcgttagctcaatggacttcgcctatgtatcccagatggggaacacatggtgatgcaggccggggtggaatatgcggcgttggaatagaattcaatagagccatagtttggcttgtgcatggcccgacgggagggaaaacggaaaaacagataaaacaaataaagaaacgcggatatagggcgacgatgatgcgagacaggggtggtatggtatggggcagtccataagtgtaaagtaaaaacattacagtactcacaaattgatcagggccaagagccttgagacccttaacgaaatctgtgagcccttgcagatacgtcaaggtttgagcttcgtattgttgaggagtttcatcgaagaagattccgcgaaccgcaaggttggggtcggaggaattagtcggccagtccgcataggtctgaatatccttgcgaacctcagaagcattgcgctttccataggaggtatacacatagcccaacacccgcacattgtcgtacgcagtgagtttggggatctcgcgcgtgtaattgccatccgggagagagtcagggccgggaccatttcctggattgattacgacggtaaagttgacatcggggtgggcggatatcctgtggcgttcagcgactgtttttctgtatttttcctttcttttctaatttgtatataacggcgcagcataatgtggctggctaccaggatagcaatttggggagagaaaagaaaggataaaaagggtttagaaacatacacattttccagcggagcccacgcctcaggagcagggtatacgtagagtggaacgaacaccttcgccttcggacccatgctatttttcttgtggagggtagtgaccacaacggaggggacaacggcgacaataatcacaatcaggaccacaattgccaagatgaaacgagataacttcgacttcaggcacgtccggttgctcacgtgtttctcagtagacataatgggggatttatagagagaaagttgaaaagaatgaaagtggattcgcgaacagcgccggttacatatgaacgtgaatttttcagagcatggctgtctgaaaaaaaaaccaaaatggaaacaggttgatcaacacgacctaaggcttggaccctacggtcgatggatctggggcgaccagatgcagtaaggtgtcttggccaagacgtcgaaaaaagaaccgaaatagagcaaaatcgaaagaaaagatttaataaagaaaaagcgcgaaagaataaagaaatacaagaataattccattattatactagctcgagaagccctgacgtactggtacggagcacggagtaaagatagaggcagttagggcatgcgaatgatatcccaaggtccagccgcatgtctggcccaccaaggggcatgcctggttctgttccagttcattgtgccccctcttgcactcgctttgtgcttttttttttttttatttccgtttatacttaggtccttttctttctttttccttttatttttgccgggggcccgtgctgaatcctcattcgtcaaggaagatggcataatatatgaactcaaacagaggatccgatcgagcaacgcaggtacctcgcttgttttgtataaaaccttggtggagggcccaccgaagaatcgggatatcttagtctggtcatataaaaacatagatcattttctctctttgttcgcagcgatagcataccttccaaggttacctggcattcatcgtcaacttcccatcatgattgctccaacatcattctcctcgtcgagatccgacagtcctcataggtctgatgcaagcagtcctgtgcagtctcccatcgccctggacacacctgtaacagaggctggagacccattcgacaatctccatgacttgttgcgcagagtccctttccagagccacattctggtcactggtggcctcggtttcattggtagtcacaccacgcttgagctgctcaaggcaaactataacgtcattgtgatcgacaatcttagcaatgcattcgagaatgtgttcgatcgtatcagcctcttggccaagaagcaccacgagaggaatggaacgaagatgccatctctgcggttgcatgcacacgattatcgtgacgccaaagctcttcagccgctgcttgaggagtaccgcctcccatcccggtggggaactcccaagtcaagaatcgccggagtcattcacttcgcagcctataaagccgtcgaggagagcattcggaagccactgaagtattactccaacaatgtcagcgggcttgtcgactttgcctcaacactcggagacttcggcatcaagaccttcatcttctcctcctccgccaccgtatacggcaccctcgccacctccggtcttccattgaaagaagaactgtgtgttcacaaggaagaggtgtacacagatcacaaaggcacacaacagtccatccagcctggatgcacaggcatcaccaacccatacggacgcacaaaatggatgtgtgaaaccatcctcgccgacttggccgcatcagaccccgaatggaccattgttgcactccgctacttcaaccccgttggctgtgattcttccggtcttttgggcgaagacccaagacaggcaccaacaaacctgcttcccgtcgttgtcaaggtcatgaccggccagtacgccgagctctcgatgttcggtacagactgggaaaccgaggatggcactgccgtccgtgactttatccacgtcagtgatctggctcgtgggcatattgccgcgctcagctcggccaacgagggcaagttgacagaaaatttccgcacgtttaacctcggaactggaaagggaaattccgtcatggatgtggtcagcaccatggagtctgttatcgagaagcccattcctcgccgtgccgcgcctcgtcgcgaaggtgatgttggagcttgcgttgcggtcgtcgaccgctcgacggaagagctccaatggaagacagaaaagagcttgaaggacgcctgccaggacatctgcaacttcttggatgtcagtggtctgtcttcatagcgcgttcctcaaaactcctggtccgatatggtcgttttttttcttttttttttgcttttcgcttgttcctaatacctgctcaccgaacaatagcccttacgaggcatgtgtttcagtataatgattgtctgtttttctgtttgtttagcatgtgcatagagttgcatgactcgccgagtattctcggtcggtctctgtgatattttcccccttgggtgtacagagtcatttacatacgtcgctttgttgctatattcgaattgacaaaagttcccatttgccatttgatccttgaattgtacaggttctccgtgaatactgctagtcgagaactaatcattagttgttgacaggatatggtgcaaagatgtgtgatctcatgtgccagtacactttacacaaccggtttggacgtctggataggagatttcggggtttgcaggagacggaggatattaatttgcctcgcatgtagtctatacacgggctagatccttgtagcaagaaatgaagctgccctacgtcgttgaccatatttgttgatgcatcacgtgactgatctcggtcttggcatcaaatatggccgcagttttctgcgacagccttgtccgcgcgtgtgttattgcatcttcaatgcaattgggatttcttgtcgcctaggaccttctattgaacgtttcaataccgtcctattctattccctgtcttctctgattgattcgccacaatgatctgcaaaagctgccgcacgacaatgctgtcccgattcaaccagcagccagtgatccggacggcttcagcatgtgcgcgccagctgcctctggttcgcagccaattccgctcatacagcagtgacaacaacccacctgtggctgctcctccttccccgtccgcccccagacaacccacggtcggcgacctcacaactccgtccgccatctcctccgctacccccggcatttctcagcctctgagcacgcccgaaggtgtccacactgatgtccaccccggagcttccacacatcccacttccgtgcgcccaccgagcagctgcccagccggaaccaaactgaatggactcaactacttcaagaacaagccggatgtcttcgccaaggaggattccgagtacccagattggctatggaacctcttgggagattccggcaaggaaaagactaagcagggtggtgttgacccaagcagtaagatacctcctagaaatcccgtttgcctatgatgcttaccccgtcgcagccttgaacaagaaacaacgaaagcgttacgataagaagctggccgctcgtactggccccctcgctgctaagatccccgcccaccacaacgctcacgatatcacccccgcaccctacaaccgcgacgcaccttcagcggatgccatggccgatgccaccgagggctttgagcggcgttcggagattatcaggagtgcccgcgacgccagacggaaggccatcaaggagtccaactttctgcgcggtctttgagctgttttgtatcagttcgagtggaagggatttactctgcttgttggggttgtgtcgcaggcgctcagaaccacctcgattttgcattggatattggatagcctggacttttcggagcacccgggatgtattattacattgatttctttttcgattgtgctatatatcaatgatattgtctcagattaagttcgcctcggagtaccccgaacagccacctctgtctcagaaagtcgagatacataatctattgggaaaccggccactccttctcctccccttgcccttcaagccaggggagacaagcttcataaaacgctttcaactccccatccccaagagcaagaatcttctcaaaggtaccctggtcaaagcgctcatagaaacccaaaagtgaagcgagaataatatccgcatagccagccttctcaccctccaaaaacggccccttcttcccctccttacccttcagcatcttaaccagtgttcccatctccttctcgataagctgccatagcgcaagcaactccgcctcacccgtcggcctgacctcagaaagcggcttcccgaacgccgcggagcgcgtccggataaagtactcccgtccacgctcatccagtccagatggaactctgggaacgatcagcgacttggtactcggtgcgatcaactccacgatcttgtccacggcgaccacgagcgagtaacttgcgtcgccggaggggaagagcgggggcgacgggtacagcttgtcggtgtacagggcgatcgcttcggattccattagcacgccgtcttcgttgctggtaattgatcccttgtggctgattgccggtagtgtgtagggtgtcgttgacttggcgggtgggacgccatgcgccttgagtaaaggtgcgatatccgggtatgagacccagctttgggtgtaggggatacccttgaagttaaggaccattctggtccggagagttctgggagaccatgacttggaagtgcctggttagattagttatttgtctgtctgcagtgagtcatcgtctggtccgtacccggtaggtctgataggagatcgaagaaatggattttggattcagtcattgtgtaattgtagattttgtatctggtttagagttgaagtcgtgctttaaggttgaagtcgagttgttgagttgttgagctgttgagtatacatgtagttctatttatacagccctggagacgtcggggcgggggtttgatttatcagctgaaattctttggaagcacagaaaagaatagaagctgatcaagaggctttcctttcgttaatacgctgtgagtatactttcatcgaggctaagctgcgagaatgaaggtagtgttgaataaattcatatttcatatccaactaatagatacatcaagtaattcgaataccacagccaaaagtctcacttcatatccacgatatagagagcgccacgttggcggggagctggagcgcacgggtcacatggggattttctcccgacatcaacggtatgttgtctctaacacgacgtagttcataaatccaattctccatagaaatccacaagtactccagctaagcggggcaacctttgccaacaagcccgcccctccagtcactacccaacatccataaggttgcatctcctatacaacatacgacatactccctgctggaaaagaaagctcactgacaatataccagtgaaagatggagcatgtcgaagttctcgtggatcgtgctaaacagctagtactccacgagccacccagggcacaaacacacacacacaccgtggacaaattccacccatctttggacaatcatatccaggagatctacaagtctgtcaatgcatatgctccgactacagactatttcctcaaggaaatgcagcatgacaataccgtcgcagattctcctgagcccgtcaccgatgctttggcttcgctggatgcatttcgtgagtacatgaaaggtgtgaacgcgtctgcgatgggaccagaagaagccctggatctttccgcgcctctttcggattactttatctcgtcaagccacaacacttatttgacgggtaatcagctgtacagcgacgctgctgctagtgcctatacatctgtgagttgatggttgcagaatagtcataccattttgatccatggatgttatgatctccaggacctggaattgaaaatttactcatgttccaacaggtcctcctccgcggctgcagatccgtcgagattgatgtatgggatggggaattggacaccccaagctcaagtgacggcgggataggcagtgacagtagcagtgattcagagactgaaaaggggaagggtatgaggagcaaattgaaagaaaagatgacgggccgaaaaagtggccaggagaaaattggtaaaggacataaaaaatccttatcctccaaattggaagcgaaacttgatggcgtccttcgtcgcaaatctgccaagtcgcccccgcggccattggacgaagacaccgcgacgagccatatgcctattccggttgagcctcgtgtcatgcatggccatactctaaccaaggggaccacattccgtgaaatctgctatgcaattcgtgacagtgcatttgttgccagtgatcttccagtggttattagtctcgaggtacatgcgtctctcgagcaacaacagacgatggttgacatcatgtcggaggcgtggaaaggattgctcgtggaggctcctccggatggagagaagcttcccttgctagctgagctgaggcggaagattttgatcaagagcaaaggtgtcccgctccatggcgaggacaagaaacccgaaggagaacctctgacgccgcagaattccgaggaaaagtccccgggacaacatccgccgaagcctccaaaggttcttgaggctctggccgagatggctgtttatactcgcgcctatcatttcagtcatttcgatcaaccaggtatgtatcattgtagatatggtcatgaaggcaatgctaactgaccaacagaggctaaattccctcatcatgtgttctcgctgtccgagaaagcagcgcgagaagcccatgccaaccatcgcgaggccttgttcgagcacaaccgaacatctctgatgcgtatctacccgtatgcattccgaatcaactcatcgaaccttgatccaacattctactggcgacgtggcgctcagctagtagcgttgaactggcaaaagccagacaaaggcatgatgcttaaccacggaatgtttgttggaacccacggctggcgactgaagccctttggctaccgcagcagcaattccccgacagatatcatcgtgcgccacaacttaaccctctcaatcgaagtattcgccgcgcaaggcctctctctcccaccgggcgaccacagcgagaagggattcaaaccctatgtgaactgccagctgcacgtcgaagaaccggacggcgacatcaccccgggccaggacgatgccagctccgacacggagaaaagcagctacaggcggtgcacgaagagttccgtaggttgcaacccggacttcaagggccagagattggagttcccgaccgtgatgggaatcatcgaggagctgagtttcctacggttagtttttcttttctccgagattcccccttgctgcttctctacccctcatcacattcgttttcaagtatgcaggcataaaacctgcattgtgatacccgagaatatatgcactttcccgcatcacataatcatgacgagtgggcttgggatttgcttcttccagacttcccacttggtaacgttatgcattatgcactatccactattgggcttagggttagcagggcgacctgtggctttccgcagaatcagctctacggagtcctatcatgcataccaccctatgcgttccactatctacaaacaagaaactaactcgggtctgccttcctttcttaggttcaaaatcaaagacgacgaaatcggtcgggatgcattagctgcgtgggcttgcgtccggcttgaccggctgcgggagggttatcggctgattcatctccatgattatgccggcgagaaggctggcgggatcttgctggttaatattgtgaagcgggttacttgactgcccagatgacgttgtcaccgtgtatttatttgtttagattgtcggtagtatagcgataaagtatatcacaaattctggaattctatattttacggaacagaaggccatcgaaggaaacacagcgccaggaccgccgagtatcttcaagcagggtttgggcagcatgtcgtacagcgcacctacgcattaggagcatgcggagcaagaaaatgtagcaggaaggcaggccgatatctgataaatgtgacaagtccttcgacatgtgtatcacaaactcatcccattcattttgacatgaccccaaacggcaggctacatattaggatcgctaccgaagtgcaatctgcccgtcagcatgcatatctgactcgagaacgtcacacagaagcaatgacacttcggcacttcggcttttgaactcttctcttctaacttcgagaactgcattgcagagctaaggcgcaacaatttcgaagacagaaacaactagtctcggccttacaatttctcgccaagggtgtctgaataaaggcataaaggccgagcgcggggtagatcatgtcttactttagctaggcggctccgttggcatcgaagtgggtgcatggagaggtctgtaggttgcctgcagtgtcgtgctggcggtatatatcacgttagaggattcaattcttagccgcatgatatgcattgtgccgatgccgcgcatgggtaccattccaatatgttggtttccggaagagcggctactgtagatgtgcatatcgcaatccgtgacttgggcgatatctaaatcgggttcatttactaggttcgctatgtacgagaagaagtagcggtgacggatcagacagactcgggcgtaatggtgatgcatagaaacgtggggtagttgtccagccctggacttcgaagcatttggcctattgatagtatagtacgtgggtggaaaaaatggtcttgcatgctgcgagccatagccccaaccgtggggttcgtaccagaggaggatcggtgagaccgagagtcaaatcactaggtacaatatcaccttagaagggtcaaggcgccaagttacatgcatcagattgatcaacatggctagtggggactagcagataagtcaagttgaccggtaaatcctccgataaagttgtggccaaagagggtcacacgtcggctgaaggatcgcaatatgagacgtctacggttgtcctccgattgcccagggcctcaacgaatacggagtctggaatagtcggtgactcaacgatagaactcgacatggttcttcctaagcaaagtacaatttgtcatctgacagatcctggtgcaggggttcatgcgtcacttccacaaaatttgcatgcagaacagagtgataatcggcctttggcgttggatcaaacgggctagaacggtacggccaatgatcggaggagatcgtctttttaaggaatggagggaacccacgttgaaggtcattggccaatcacagcatgcctcctaccgaagatgaccgaacactagccctatctgggatctgccatcgttctggggttgatacgtcaactcttgaatgtgttgagaagttgcaatttcctcgtctccccccttttgcttcgaagtatcggtgaattgatgcaagttgccgagacccgctacactcatttctttgtctgatttctttggatcgctgatcccttagccttttggacgaaaacatggtgaactcacaaggccggaggcctcgggaagtaccgacgaagccgctgtgattggccttggtaggctagtggcgtacaaaagaggatcatgatgacccttttttttgggcacaggtacctgtgcaaaaaggcaagcccgtcaagacgaacatccatctactgttactggctgatatcattgggccaaacaaagaagtgactgccaggtaagtttttgatattaaatttgagattacaatattattatttccatattaattatttttacctgattagccaatgtgaactagatctattcttctctttcgccttttcccttgctttccaggccttataaggacccctcctcgtcctgttccatggccttgtattcagacttcaacctaagacagtcctgaacatcctcgggcttcggcaaagaactctactcacaccttctctcctcgacgtctatccaagcaacatgtgttccttcaccaaatgtgctgcaccagtgtgctctaactccgctgtcatcaccaaggtccgtacaccttactcctatatcgatgtggtacttccagcacatttacgaatatactaactatcaacagatgcctggtgtgcgatgccccaattgccaagcacaggggaaagaagtctgggttatcccaggcaagaactgtcacatctgccacaccccttgtggttgataacttcgaggtcctgtgctgcacatctatgggggaaaagaccgtgcagtcaaatctgcccatgctgtccggatatgatctgattccacacttcaacttcatacactctcccggtcatatgggcattccctcttgaatctgaaggatgaattcaatacgtctaacacacgaaaggcctgcgaataccttggagattgatacacttatttgggactgggtgaaccccaggtggaaggcgcaaaatgttctgtcgtggtgtttttgttactattttctttagcgttttctgataatgagatatgacaattcttgattttggcttttcttcactagacgaaatggtgctgttcttgccatcgggccgagtagatcagacagactgaagtgccactcaggtaaactttttaagtacaatctagaagtagtaggtagcccacgtgggagttcccgggttatatgacatcattcactcatagcgacaagagtgcacgcacagagtaactctacatatatacgggaatatagctatgatacatatttgactccctctggtgtataagcctttgtaagctgacgcaggaaagcaagatgaggttctatatgccactactcctctaagcactatccctataaagtcatgctaagactgtacttcggctgcaataaagcggcaagagatacaccccaaaacagaaaagaacagggtgcgtgacctggaaatttatccggtccatacgtatccatcgccttcaacttccatctcatccacaaagaaagcaacattacaaatccaagccagatcaccatgacggaaaagtatcccatcggcacacgcaccgagagcgagcgtctcgtccgcgagtgggggtttcgacatatcttcacctggacggatggaaggtacgtatagttttttgttagaatcgatacatgatacacccaaaatgaaacccagctggactacggcagcaaaacgttctctcatttgatgtatgcattgatgctgactttattcagcaacgcccattattccccgcactcgcatggcggtctgacgacacatcttattcgtcgggggtctctgactatcgcttaccctgatgataatgcgaagcataatggggaagctgaaaaggtgacgtttcgagttggggagagggttgatgttcctgctgggaaggttcatgaggtttggattggggatgaggggtgtgagtatgtgattggagagtagaaggtgacttttgcttttactataaccattgtttctactgattcggaaattcgttgataaatgttgtgacattatgccgataagctcagctcattctattctaggtattgaatattttttaagtctacctgtgccagacaatgtagtcgtgtctctagtgcaagaatcggaaatcaagtctgtacgggcattagtactcagttgcacagcaggagacaacttgaaacatacctcttgtttccaagatccttgttttcaacgacgtatcgtgagcgctcttcgctggacattttgtcccagacagcggcattttgtctagaagggaatattagcaaaactattggatctcacagtacgggctgacatacttgttacgccacacgtagtaaaccttggcaaggatgaatatcgccatgctccacaccgaaagagcaataaggaccttattaccggtgtggtagtacggcttatccggggtacggtagacctatgtgatggttagttatgaagactcgagaacaaggaaccggaaagactcacgttgttaccaatgatgttactagcctgcaccatcatgttgtagatagcagtagcaaccgttcgcgtcctcacagagcctgcattgcgggatgtaattgcgacaataatcgcgtgcacgtaaggcataccaatcaacaagatcagcagaacccaacgcacccaaggactagcactctcagatacagtctccaacgcgatcaacaggaccatagcccaaatctcagcaccgacgccaagcagcagtcgctgattgaaccgctcggaagcccaagtccacaatagcagattgataatgaagatcacataggccgggatggtgagcaggttggtgttgaaagtactgaaaccaagcgacttcagttccagactgatgtacgacgtagccggtgtgctggggatcatccaggtcaggccaagcaggtagatgagccacatgtcgtagtccttcagggcctgccagagcagcttgggagtcacggcctggcgattgtgcatggttcccttactcggatcatcacgcagcacacggttgaccatgattttctcttcgtgctcgttgaaccagcccttcttaccgcggaaccggcctgcggtctgtgttggcgagggcggcatatagaatgcagcgacgataccgatcagtccggtgatacaaccctccagggcgaacaagtatcgccagccgccggtgccgtccgattggcgaatgtggaggaagccaaatgcgaggaaagcgctgacaatcgcggtggcttcgtatgtcatccagaagtagctgagtcggataggcagctccttggacttgtaccagaacgataggaagagaatggtgtcagggatgaagccaccctcgaggagaccgagcatggcgcgggtcgtgaagaatccggctctgttgtgcataaatgcctggcatgaggcgatgagactccagctgatcatttgcactggaatccagcgatcggggccgacccattttgaaatgagctgagagggcagctcggcgaagaggaatgttaggtagaagattgtttggccggtgttgtagtcgtttgtggtcatgcctagatcgtctagcatgttgtctgacgtggcctggacgatgtttccacggtctagttggagcgcaaagaaagtcatacaggcaaatgtgcaaatgcgccaatcaatctgcgaagggtcagttacttgaacagaatacgggagagttcagtaacccatacctttctgacaatggctttctcttcttcctctgtccactcaaagtccgggtcccagcgatgggcaccctcatattcaggaatgggcttgtagaaccgcgggtcctcggttgtatcaaaagcacagtcggtctgcttggcacgagggctgtcatacgtcgacgaagacgaagactctgcggataagactttctgggtaggcttagagtcaataggcccggcatcggatgccgtcttattggcgtcttcaaccgtcatctcgtatgggattggaagtgagattacggatggagaaaagaagcattgcttgggctgggcatttactcatataagggaagactcatacgtttatttatcacgccatatttggcagatgtttcgctttggcctgtgcaggatgtggaccaggcgaaaaggtaaaagtcacaacatcgagggcagaaagttgtggaactgcgatgatcctgggcgatttagagtcaattagggttgacgagattggctaggttggctcggttgacttagggaggcctagcctggaactcagaagggcactctacaggatagatagggtagacggggaaagtttccagatccaagagatttgttgaagaaaaacagacggaaaggcgacgttggcttgaatcacgcaagtgtagtgggattgacgttagagtcaacgagttagcggagtcaaagtcagcaggggtctcgcagaatgaacctgtttcatgcagatcttcatgaatgcgagttagcgttgaataataagtattctacgaactcttgtatgtattcacgacaacctatggtgcctctacgccgtaccctaagtcccttacatgttccatatctagaacattgactaactatacaactataactatggagataatataactcctaactataataaatagaaaatatcgcgccaagccagttgtatatgacgccatcagcagcgtatctcgcgtactcccacagcgcaacggtcgactcgttttcttcagatcacggcaattggcaatgcacgcacgcaattcggctatcacgtcattcccaatgcgacgcttatctcgtatacatacaataagagtacgtacctcgaacctcctcggctcgctcgctaaattgattgtatgataacacaaagttgacacttttctgattgtcccgcaaaaaccgcaaaaccccgcaatgatggcgcaattcgtgtgctcggtttgctggtgccgaaatagatatatattgccggtgtaaacccactagaaaagatgaagaaacatatctgatccgcagaggcaacatacacatacctcgcaaactcaaacatggctccctccctcactgagacagtaggccttcgcgccccgcctgttgcgcttccgctcaaggcggacggtggtttcaacaaggagaacttgatcggctacaagattgaaaaggatgttgagattaagggcacagacaaggtggctcctgtatcttatccggaatatctgcctgtttgggacaacgagacagaaaggtatattggccttgatgatggcttcctaggaataccatatctaatagacatctagatatccccctctgacgccctttgagcactacgaccacggcaaagacgccgacccctctttctcagaactgcttcccgagggagtccaagtcgaccagctcactcccttcattggctctgagatccacggcgtgcaactaagccaactctccgacaagggcaaggatcaattggctctgtatgttgcacagcgacgagtcgtcggtacgtgacagcccttttttccatctccatctccaagcacggatctaacaaaccatccagccttccgcgaccaagacttcgcatccctcccgattcaaaaggccgtcgactatgccggctactttggccgacaccacatccaccagacctccggtgcccccaagggattcccagagatccacctcgtcttccgcggtgccgacgaccgcactggcgagaccttcctgaagcagcgcaccaacactatcacatggcactcggacgtcaccttcgagaagcagccccccggcacaacattcctgtatgcgctcgacggccccaccaccggcggcgacaccctcttcgccgacatggtccaggcatacaagcgtctgtcgcctggcttccgggaacgtctccacggattgaaggccgtgcactccggcctcgagcagatccacgctagtttgaacggtggtggtattgcccgccgtgatcctgtttcatcggagcaccccattgttcgcactcaccccgttactggcgagaaggcgctttacgtgaacccccagtgtaagtctgtctcgacacttttgaatgattgggaaagctgacatgtcgcatagtcactcgttacattgttggatacaagaaggaggaatccgataaccttctcaagttcctgtacgaccacattgccttgtcgcaggatcttcaggctcgtattcgctggaaggctggtactgttgtcgtttgggatgtaagttacagcctcagcctattctttcaatgagaacaaaagctaaccttcgcagaaccgtgtggcttgccactctgccgttttcgactgggaggatggccagcgccgacacattgctcgtctcacaccccaggccgaggctccctatgagacaccctttgaaggttagatggggcgctggaagccttcgaatttaaaataacacgtcgctatgataatcccacaaattgagaagaacatcaatgaataatttgaatatcatgcttgcattatcagcgtagacctgtacaaacatagtaatacgtcggtaatctctcttcctctgtgccatacatacaaaaacccaacaactcaagccttctcgcgcctgaaccgactcaaaagcccaacatgccactcgttaaaacgcctagcagagagcgggagcatctcgttactcttagtcaacgcctgcgacatggcttcaaagatcatagacggcaactccaactcttccaccgacaacggcgaaggattcccgatttccggatggagcagctcgtccacatcaggagcctcttggtagaacaccttcatcgcttgctgggccatgatactatggcctgcgctggaattcgagtatcgcatgtctgggttgaagacccacagctgtcaagtagaatatccgttagtgtcatttctagaatttgatatggctcaaattcgggagcgaataggaatggaatagaatatcacctaccacgagaccgctcttctggccacaatgaacgacgaatcgtcgggcgctttctctctcgatcaattcgaggagctgtgcagcgacgattgtttctgtcgggtggacctcccactttgtaatgtctgcatcgctggatgaattcgtgttcagggatacgttggctttcagaagtcgccatcccttggcggttggatcttccatgccgataatggaattgcagtttgtgcagtcgagggttcgttgtggtgagagtttaatgttcgctttttgctcttcatcattgccctggattgcatgcttgtcagtacgttgtacctgaaacgcgaaatgaactattgcgtcgaataatacttgtaaatgaaggaaaaagcattgcattcaaggtcaaggttatatagagcacatcatgcaaggaaaaataatatatgtaactctggtaatcacgcccgctccactgcttagatagccggcgctgaaaatagagaacaccctgagtcgcagaacaggaaaaagcggctcacacaagtccagtatcgcaaacgaaaagagcgaaatccatctggttagagaggataactaccccccgaatttgtgatcctgttcctgtgagagtaccaccttcgcttgaattgcagtacacaaggtgcatttcgtccatcttgggcaattgtatcggaggccaccccactgataactgagtggtccccttctaagttgcccggttctggggataaaaagggggaaatgatgatgggaagaagaggggatgtataaatcttacctttctcaatcctatgcagtctgtttcagcaaggaggaaagtagcaacatcaacaaagaccgtcccggaaacagccacaacgtggctatccgcaccataccctttattctgtgcggtttggtcctcaatctcgagcgcagtgtctttctcctctttctcgtgatctgcatgggggtcaggtttgtggcaatgccagaaatccatcatttcagcccagtttccacttggaaggtctttccagatccaccccggggtagttccctgattaaccgactcggatattagcgagggatcaagaaaaacctgttcacacactcgacaacgaatacgagtcgaagacgacatttcatctgctgtccagggtgtgaattcatcaattagttcatcccgtggcgccagcgcctcgtcattgggatcgacctgcatgcggaaggaataatcatggctggggttcctggtgccaccgggatccctggtatcactgggttccgattttggtactggcccaatgggtgtttccaacacacgccgggatgcggcgctaacgcgcgcgggcagtttgattgtttctgtgacatgcttaaatggttctggtagggagactgtgactgcttttcttgagtctgaaagttggatatctggtcgaattccgtcaaattgtgttgtctcgggaagtgacacgtaaagagttatctggcggatgtttggtaggaattctgcgtgtagatagagggggatatcggcatcctgcattgcagatgttgtacaagctcgaatgtgtgccagacagggatggtgcttgatgccccgtcaaaaggataagacgagagagggtgagcaacaggggtgattatttagcaatcatgtggagctggagtttctgactgtctaaggccatgagaaacatgtcgcgcttagattatttggacgttaactacgccgcagtggtggatgtcatgaccgcgtttgtcaaatgcaaacaatgcaaacaaccttgggtaccttgggagccaacatctacacgtgaccccatgtatcgcttcgtcgaaatgaagaaacgatcatctatcaatttattttcttcgattattcattaaatcgtacataaatttgagttaagtagagtatgaacaaagcctacagatcatatccgacaaaattccctccccaacacttgaactcagtcgcaaatcgcacagcagccttcaagaagaagctatcagaatcgccccaagtcgaggccagttccttcagtgctcgagtggtcttgacaaagtacacatcggatgaaaattcactcttgacagctttctcggcaacccatttccagtcctttccattcaagtcataattccggatttggtccattttgatctcgggccgcagttgcgcgacgtagatgcccacacagatcaaccaccattggcgaagaagagagatttgaaactggggaggaattaaaggcaacatgacacggaccgcgtggctggttgcgaggttcatagcgaagaaccaatcgtaattcccggccgaatctgctgtcccaactagcaatgcagctgcaagctcttggctctcgcggaactgttcaattggattgtcgatcttccatgctttccagtgcttgagaagcacggcgttgtggctgacaaaaagggtattgaggttgtcgtcgccgggagtggaaaagaggccatctaagtccttatctttccggaccatgtcaaatatttcaaagagtgactttgattcatattgtacctcatttttcgagagtttagggtcctccagggacttgtatatgtcgttgtgacaggttgctgcaaggccgagtgcctccattgcaacttcacgactgtccatttcaaaggcgtatgcaagatgaatcaatggcaatccaactagacagatgttagagcgtgatccccccggaaagctgaaaacatacgagaagccattatagaatcaaacatgggctctttgccagtatacaagtattcggccacaacttccttccagtcatagctgcggtgaacgacttcatcttcaaaaaaatccacaaaggctcgatcaaatctggttggcgttagtgaggggtcccaagttggaaaggcccagacaagcccagcaacccaccctcgccgtcccaaatgacctcgccaatcaagggtagtaatttctgccggtgaatccttccatttgactagaccagacacttcatgctcgtataggcagcctaaagtatcggcatctgcgccttgcagaaaggaggagctcaagagctgcaagcaggtcaatttcatggactaacgagtaatccatacataggaagctaatgttactaatgtaattcaaatgactcacatgtattaactgattagggaagttccgacggtcgaagagcgagttctcgacatggttcaattttagtaggtgcttgaatgcccgagctgccttgtcttcagctgtctcggtttcatggacgtggacagggggcagatcgatcgcctgagttggcgtggacgagaacaggccaagcgaaggcagtgacggccaccgaacagtaaacattttgctgattagtgaagctatgtgtaggcgtttggatgggattgttgggaaagcgtcacgtgaagcagaacgtcgtatgacgtaggaaatttaggttatcaatctggtgacttctggtcacatgacctggtgaatcggacgacttccagctactcaccttgcttcagatatacaaaagcattttttgatgaatcagacgattgggtaaatcgatgctttcggtatattccagaaaattgtattattttacgacatattactatttctagatgggaaagagtgcctggattgagggatattccatatgaaaattcatgattttgcgccataatttacattgcatgcatatcctgaccgtctgaaccttacgccttatgatgttcaaccattgggatcggctgctccggctgagcagcaacctctccttggaagacttccatttcaagacggggaccgacgaaattcttgcgtccatctaccatccactgaatgaaagagataataaagacaataccaaatgccgcaacacaataatctgtcacatcgaattagctttatgtttttgcatcaaaaaaagagagtcaactcactcatgttgctaccagtggcaggcagctcaggggggaagaggaagaggatagtagtcagaagaatgtacgccagcgagatctgaggttttgagttagtaataatttcagtgaaccgcagggaaaggtatcatacgatgttgatggtccagccaacaatttctggcaggacgaatgagcgctccggtagcatttttcttcctcggcagcagttcactgcaattggcattccatatgaaaggccgagcaacaccactgacgctgagacaatagcattgaaagcacttggagatgttagcaatatccagggtggagtgttatgcatatgcttacctggatgagcccaagaagatacaaccgaatatgaccacgagagccagattgagatataatgagttcaatgggacgtttagtttggggtgaacacgagagaagaagggagacgcagggagaccgccatcactataactatatcagtataatgaccaaatttgaaagatgaacaataacgtaccgcgcgaaggcgtagaccatacgactgctagtagtcataatagcgattgcagcgaataaagcgcagactagggggaagctagaaaggtgtcagtacaaggaagagacaggagagcagtgacacctacatcaagagacagatagcgcctgcgttgctcgaagtggcattcttcaagattgcaagcagcggggttgcagcagaatcaataacttcgttgatatcgccagccacaaagagcagcacaataaggaagatggctccagtaacggtaccgatcacgacacaagcaatcatgatcttgggcccctcaaccgagggattggggatttctgtaatccattagcctcagatccatatccaagtgtaaactcctggaagttaccttcaatcatgtgggcgacaccgtcaaagccggtaacaccaagaccaccttgcagaagctatgaatatgttagagatgctcatgaactttcgcacgaacgacataccccaagcaaccacgcaattccatcaggccctataacagtcagtttgagagcatagttagataatgatcggtaagacttacagcctgtttcgttgatgaagtcggtgaagacaaatctgttcattgtcagtgatttagttctaggattgtcgagcagacaagacgtactctccggaattatagttaggcgaggcacatgaaagtacagtaatgcaaatgatggcaaatcctgacaaagaccagatgactgtgggaattagtaagaagtctccgacagctcggtatagggtatctcacaagctgccttggtgacatagggcataatgttgttcataaaggcattgacgaggaaggcaacgatattgtagccgatgtagattaggaattggtgccagcgctgggggttatagctctggatatggaagttagtcaaagatatcaacgttatagctcagaataacctaccgggttcatgagagagatcacacccagaataagctgactgcccaaaagaccagcagttgcgaccagcgcaacccagccagagcagttgatccagccagtgatccaggagagaattggcatccattttttccacgaagtcacagcgacccagtgatattggcctccggcagtggggtatgcagaaagaaactcggctagggaagtggccatgcacaaattacagattccggctgtaataagacctattgagactcgtgtcagctctggattgagaatcgacagagagccaggcggatacgtaccccagacaatactagtgcttcctcccgagggtaaactgagagacaaacttgccgataaagcagtccatgactgtcaaatgtcaattgttgattctcatggaacttggtttccgggcgcgtcacgtacatttagaatggcaaaagcaaggcccagcattgaacttcaaaacgaacagacattagcacaatcaggaattcatgttcacttgcagcacgtacatcagcgagtaatttcgcttcagctccgacttatggcccagctgggccagctgagcctcgtcgctattgtattcttctttgtccatatcgagtgctgtgtatcacaagcaacaagtgatggaaagaagaggacaggtaaggaggaacaagggtattattaaaccagtcccagattgcatgacctgacaacggaatttcgaatatcaaattctccaatcttgccgttctgcgctaccgttggctccccgcgggggaatacagcgagtacggagaagtgttaggtaacggatttggggttatagaacattagccagggcggcgataaccggccgtgcctgtgactggctgggcggaccgagatcggcaacttcggccagtcagagctgtgaagtcaattagctaccaaggcttttggtcaatcgcggaccgatgatccatggcttgcggcggcagccccagtgcttatgccacgatcggcgtgtcattggtcaattgccgaccccacatttattgactagcgggaagaagtctaactcggggaaatggataactgcgaaaggacatatctgatatgcaggatacatgaagatagattgttctcgaagatccggtccaacactctcgacttttactgtttctagaggcttttacggcttttgccccctgtttcagtgaaccggatcgagacgttgaggttgagctatgtggagcggtgggccgtaaaccttccaaggttatctctcgagacaaatactcctatgtaaagatatctcttgtcttcactgagtggactcctttcaccatgtggcatgctttcttatccgatcgtccatcaggacgtacccgcagaggcgaagtgtgggccgttgaccttgatcttattccaatgtgctccgagcgtatcatccagaaagaagataattatgagaatcgaaggattcatttacataaaacgaagaagagcaaatttactaactagttaactagaatttgtattgatttgtcacttccattatcccgagaatgtaccgggtacaaagtagtacgtgcattgttcaatcccaaaccacgtcttgacatcatccatggaaatccaatcctcagaatttccaacctctcattgttcaaatgacaaatcatggctggtctcaacaaacatggccaggcaaacaacccaggacccccttgacccagtgttcctccaactcccctgtccgttacagccaacagtctcaaagttaatgaggcctctctggcatcagttcttgcattcagggggatagagccacctgtggctacatattctgaccctcagcatgcagcaggaaccaacccccaatgcactcggttcgaacatgctcaaccatctcggccatggtccgcacatgaaaggcgcgacggaagatctcgaaggatcgctcatacttgtcgagagcaggatcaagttgcatcatctccatgtgggtgttggaaatggtctccatttgggggtgcgtgagcatggcagtgcaaccacggcacgcgtaaagaattttgcgcgtattgtttcgattgacgacaggcacccggcaggaaacttcatggtggaaagcatgcagattgcagtttcccaacgagatgaggaaacgcatcttgacagcgttaggggtgtccagggaaacagcgcgataaatatcatgctggtttacgaccgtgaattcgtcatcggaaccatcttcgtcgtattcgttggcttcgtcgtcgtcagaaccgaacaggccctccgcagcacgcttgatggccttgcgggagccatggatttccagggctctggtcagcgccaccttgacaggaataacccaggcaccaagatcacccaaatccatgtcatcctcatccttgcccaggcgcggcaggaacacggtttcgggaccaatcagatcgggcaggtcaaggccaaagatcattgctgcgcgctccaaggggaggcaccagtatgcatggttgttgtgcacgcatgggtggcagatacgctccatggtaggaaggtagagctggacagtcgagttgccacacatgacgcacttctcacggataattgcctctttcaggtcgtgaatgctccagatcttaaggctctggatgttcatgagaatcttcggcaggccgggggcccactgccgcaggagggaaaccgcgcttttctgcacatagtgattggcgatgcggttgacgtatgacaggctgatagcactaggcaggtcgagtttgttgatgatcatgtctacgacttcgttcgggagacgactgatcattcccaggtccgcagtagcggtccccttgggtttgatggccactggaacaggccggacctcgacatcaacgatgccagtttccaggctgcgggggctgtttccaaggattgatagcaccttggcagcctcctggtaggtggcaaaatcctttccccaggccaattgctccggttccagcgtgatggtttgcattgtagcgaaccgcgcgtgcaaatcacaaggagggcaatttgttggggaaaacgcgttgcgcgttaacggataaaagaactttatcagtgttatgtcagtggctgatgtgatgaacaaacactgtaggtatgataaacgcgaacctgatgaaaacaacaaccaacgcgcgggttgagaaggatggagtgggaagggagatgtgaagaggaaagggaaaagtaacaacaagaaggcacaagaagaaagagacacaaccccccagtttatggactgaagggaatgggaaagtacgggaactgcctggcgtaacaaacacaataccagtacctagggcactttacgatgtttgttcacatactctatttctcagttaaagctttcagtaagcttgtgctcgtagaaggcctccagcttgaccttccatacatgcactctcatctacttgaggatataaaagtgagtctactaggaagatcagtccaaataagtctaacgtcactaccaaagacaaagttacaactgactagtgcttcaatacttccggagaacaaaaggttatcctgtttcattcattgatgtctggtaggaaacttcactacatcataatagaggaaatgtctggcctgccagtccaccggggatatcaccagagctgacagctggtgggctgggatagagagtagtccatgaatgcatctatcaaagagatatcctagatctagtgtaatctacatagctaatatggttcaaaatgtctcagttctgatacctcttcgtcattagaatcaatgcaagtcgtaggacgtcacataacagtccaagtctaatgcattgatgcactaaataacattggtgaaagtagtgaatcatactatctagaaataaggtacatatattaaattctaaccatgtaataccttgagatacccatggtactgttagtaggcgcgcgggtaatgctagcttaatatcaacgggtaaccttaatttgatatccggcccaccaggaacacgcggtgtcacagggaacaacctaccaacttgaaatactatactcacaaagataacattgtgatagaaacctagggatgttgtaatggcagagaaaataattaaaatgtacagatgaacataggtatatcaaatcaggatagtaaatacaaaggccatcggccagctggcacgttaaaatatacaaacagtgccgggctttctattcaacctcctccatagggtttttcaagtgatcagtccgaacgacgtaatcatcctcgtcttcatcatctcgggcattggcaccatctgccatatcctcatcgtcaccatcaacagatccatcggattccgcaccagtgcgggactttccctttttgctaacgctctttcctttgcctttgctgctggttgttgactggccgctgccacggcggacaaggtttcctggccatttattcaggccttttatacgaccgtggatgctcccggtggtgctactggcaccatttgtggcaggctcttctggagtggctgagccgccttggtggaatgcctccattgcctctgcgattgtctgtggtgcggtatgtgcggagtcttgctttgacttgtctactgcttcgaaggtttgacggatgcgctcaaagtgttcgagttccttggcactgcgaggagttagtatcatggtatgtcatgaaaaagagacaagagaggaaagagggtgagtgatggacacatacctgacacttggcacgagctctccttgagcagaaaggaagtcctcctcggttaccgtcacattcacatcctcctttgtggcgaggtggtcaaagaaccaagcggtgctgacgggaccacctggcagagtcttaatcttctcgtcaaccgcagtggcctttcgagtgatggctttcagcatggcatccgagcagagtgcatacagatcagcaccggtataagttagaggaagctgttccgcaacgcggtcaagcgagacatcggggctgagggcgaactttcgcgtcaaggcctcgaggatagtcgcttgcttcctatgtgtatctgacacacccaggtagagcatcttgtcgaagcgaccagggcggagaagtgcagtgtcaagtagatcgggacgattagtcgcaccgatgacaaaaactccaccgctattctcctcgccgccgttcattccatccagctctgcgagcagctgactaacaatacggtccataacaccaccactgtctccctggttaccacgcttgggcgcaacagaatccagttcatcaaagaacacaacgcagggtcgagcatcccgagcgcgctggaatacccggcgcacgtttgcctcggattcaccgatgtacatgttgagcagttcggggcccttgacggagaagaagttgagagagaactcggtggcaatggccttggcaagcagggtcttgccggtgccgggcgggccatagaacaagataccactgcgcttcttcatgcccttggcgaagagttcgggccgttcaagtggcaattgaatggtctcgaccaaggcatccttaacattagtcaatccaccaacatcatcccagccaacatttggaatcttgggtgcaccgatcgaatcggcaaagttcttccgcgcagcttctacagcagcgtcaaagtctgccttgttgacacctcgtgcaccgtcgcctcctgccagcaggatgtctctaacaaagacgtccgagccggaaagctttttgctagcctcggccagactttcgaggcgagctgttctcgccccggcagctcgttccaccacatcaaccagatctcctgcgacaagagctgcggtcttcagagcaatgctgcccagttccacgtccgcagacagtctgatactgcgatctgcgacggcattttgtaaaatgccttcacgctctttctcctccggtgcacccatctcgaactcatgggtgatgaggctgcggataccttcgggtatagtttcaacatcggtggtggtggcaataacaactctcgcatcattcaagatatcgctcattgccgtgacgatacgatcagcagttagaacctcgatatgtctgatcagcagtgcggtgcagtttgctccgcagtggaaagcccgttctgctcgggctttgagatatgcctcggtcttgacatcgccaccattcgcaccaccttctgtcaagatgtcgtacgcatcaatggggaatgtgtggaggccgatatccgagcacgctcgagtggcgacggttgccttgccgatgtgcctttgctgggatctgaggagaatgaagacgggcttcattcctagctgaatagcccgcgggcttgtggcagcagatatcagatcacggattcgctgctgcaatacagggataaaggactggggtggttcggcaacaatgccatgaggcgttgggacatcatggacgttctttgggattgtcttcacgcccagccaatactcccatccgttgtccagcactccgggaactcggctcacgtcactcccagcctgtaccatgcgcgtaatcgctggatcaagtacagcgactccaccccactgatcttcgcctgtctcctccagctcctctacaacagttggggctacatgcccgacacggaaccaagcgacgccaattttgcgggttccggcattatttgcattggcaccttggcctagccggatggtaatatcctcctcctgactggcactgtcaccgccagcggtgccagagaacaccgctctgccgagtccttcgtccacgctaattccgaccaaatcaccacttttaaggatacgccggcgtgactcaaagtactgtttcaaccccgcaaatagtgctggctgaaggacccgatccattgagagaggagtggaaaccttgagcaacgtgacctctttcgccaaaggcgggtttttagcagcagtgttcttcatgtgatgcaaaagaccaggtttggaggagctattaggggtaacgaaggtcatgggggaaatccgcaggtactttggattttcaatgttaccaagaagcaacgggggaacgaaaactgaaggggttaagcgggtgggtgcacgttgtgagatactggaccggcgttcacctgagtgattaatagcataccgcggcttggaggacggaagacccgaaagaccaaaaatcttaactgggcgccaatcgcctgagtcttcaggggagtcgttgaaacttccaaatttgagcgaggcgaacatgttcagctgcggctcctcggcggcttcgattctgacccaatcgccagagaagcatccaatcttggcaagggtgctgatatctacaaagacaaaggagtcgacgtcttcatcgtcgcgaggccgagggtgcaacacctcatttgggactttctgcaagagtccctccaccttgaaagtcttgcctccaccacggccagggcgcagggtggccgatgtgaaattcgacgccacagacccgggggtatggattccatctaatcgtcgaccgccggctctaggagtcgccgaagtcaaggaagacatcacccccgatgatggctgtgggagttcaggtgcactaagagaaatcatgtcgtctagagaatcatccgaggagtcactcatagatcctgctgacccctccgtatctgactcctcagcagctgatgttacctccatttctgtcccactttcaccaggtttatcctcggctgcagagtagaattgttcattggaagtgtcgtcagcttcgtcctcggccacttgcttcagaagcgcagacctggaaggcacagtttgtggagcgcggagtccttgagggcgagcctggacaagcacaatctttgtggtcggcatcaacaaaccttgcgaaacgggctcgcagaatgagatccgcgcaggcggtggtggcgcataagttatgggatgagaagggagtggcaggggtagcacgtctccgatatgtacaatgcgctgagcccccaatgcttcacggactgcagcagtgagacgctgttcggcatcccttttcgaatacttcttggcttctaccgacttccccgttttcccccaaagtccattcggccccgcattcgtgaatccaccaccaaatttactctgaacatcatcgtgattgcgcagaagatgtcgctcaacagttacaaagattgtatcgaggtgaatcggggcgacatccagaatccgaatctctacggaacgttgtgcctgcagggagttgcgtgacgagtcaactttccccagagcttggaggaaaggctggagtgaatctgctgattcaggaaacagaactgtcgattgtgacattggaactggcgctctctctgtgggctgaatgcgcacagggagtatcgtccaggtctgatcttccacggaggtataagtcggcgtatgtggggcaattgcaacataaagcactccatcgtcggaagtcgtgacatctgatcagagcaagacgagccggttaatactattatcgagaacagtgaacagggcttcacactcaccttggagggcctgctgctggaagaggtcattcgcaagctcctcggacaatatgccgaccttcccgcgcagctggggatctagcgctaaacgtgctgcgatgggtgccttgttgttcaatcgccgctttccggctcttcttctccgttgtcgaggccgctgggagctctgtccatactgttcgaagtccatgggtgcggtgtcttgtccggttgccgtcggtaaaatgaagcggggagataggagatgtggacggaaggcaatcaccaattcagctgtttaatacgcgcatatgagacgattccctacagaaccccgcgccagatttagcgaattactggggaagaagacgaggttcgccggattcagaatccgggggaaatcaacacgcgggcatctcggtaccgcccgcaattctgccatatcccgaagccgaggtccaatcggtcaagtatatgtatgtgtaggacatatatgcatgaatagaaaggatatatgtattactgttctgctacacttccattcaatcagcaatatggtcccaatggtattcgagagtgtatggcattcagtctaaccccagtcgcaagcgtgccctaacaccattggcttttatctgcttgtgatagttccccagctctggagctccaaatggctgacatcattcgggctaggatcaaattgactcccgaggtctttatcctctgaacgaagagatgagtttagaattgaggccttgtccctttttcttggcaaaatttcgtccctcggaagtacgtcaactctcgccattgccaaggcagactcattcgtagaggttttctagcaggtattggtcatgactagttatttaactaatcgttaggcagttgcatatcgagttcataatttcgcagcctggaatatttaggacggaagtcaggccggtgacgggcgaccacgccaaaggtgatgtggtgatgtaggcgagatacaattccggggggaaaatgcggttgactgattgtttccccgggcggcttgggtagactttcataccaattccatggcctagtgccattgcaaagtgaggtcagttacaacgtaagatagccatataccatgaatgcactccgtactccgtagttggcatatcaatgaactatactacaagggtggcgttgtcggtccttttagagatgccaactgtaccgttgatttcaggtgtagtagcttataaagtaaataagacgctacaaagtggctcaagaatacatcgtctctttggaaagctggtcctttttgataaactgacaggtaggctgtgcatgggcaaaaaggagtcagaaaagggcgaagttgaggggtcgatacgagcaaagagtctatttcgtccgatcagcatagcatcacaggtagagagccgtattcgtttcaatcgggcgagttttcgtccgacaaacgcaggctgagcagaccaacattggaatattattgggttactcaagacgggtacaacaagcggtgataagaggctcaagagtgcgtatgcagctcgtatttggcaagcatgactggaccagaatgagtctttggatgagctggcatatcggcctaaaagttagtcgacggtgttccctttttgttggctgtgtgacgaccctcttgattaccaattgggggccaagaccctgagcgtcatgtgccccatgccaataagcatggccatggtaattttcccagcccagactttttatggcctgatcccagtaataggtgacgtagacatggaagaaaataaaggtgctgactccaccggctttcactgtactttggatgaggacgcgtaggaagaaataaaaatgctgcctggggaggtgaggctcttttggaacggaattgtggtctttccggctgccgagtttccattttaagacagtggaaccggtggagaaacggtaccgtacccgccgggggccacgcgggagccacctcaaatggctggcctgtttaattacggttattggtttaccatacaaactttttccacggccaatcaccggccgtagaatgtgctcagccttcgcattctataccaattcggtcttagcgccttcgtctatcaggcagacatccaacacgcaatgagcctccggtcccttctcttccttgatccgcttgttccccccgtcgtctgttgttcgtgttattcttcatttcaaatcctatttggctattcatcgctgccttcagtctaaggatcctaaagatttcatatttagtggggctgaccgcttggaacccatcttggacgttatatctcaggaacattggaatcccatcagtacttcgaattcggcgaattcatttcaccctaggatatcgcaatccttgattaaaatccttttgagctggtgttcttgatacgctctgtctcaaaccccgctttgaagttttccgaccccgcgacacgttggattggagtgcatgttcttccagaggctctcatacgatcgctatcgtgatagatcttcagggccctcataccggctcaaccattcggctttaatcaaccctggttgggatccaagagaggtggtgctgttatataccaaagaacgaagatcatccgcatcaaatcgaggcttgcatctctgactcgaccgtacgtcacttcgctaatcatttggtcaactctccggtgagtcatgcgatgcgccaatcagccgcaatccactgttcctttcctgaccgagaatgtatactaaattctggccgacatagtactacgcccaataatgtcttctattcagactgagccgacgcgggtgcacccnnnnnnnnnnnnnnnnnnnnnnnnnnnnnnnnnnnnnnnnnnnnnnnnnnnnnnnnnnnnnnnnnnnnnnnnnnnnnnnnnnnnnnnnnnnnnnnnnnnnnnnnnnnnnnnnnnnnnnnnnnnnnnnnnnnnnnnnnnnnnnnnnnnnnnnnnnnnnnnnnnnnnnnnnnnnnnnnnnnnnnnnnnnnnnnnnnnnnnnntgcacccgcgtcgtcggccggtcttaaacagcgctcttcccagcgactcgcccagctctaaaatgcccctgaagaaaggagagactttccattcccctacttctcctccatccagcgatcgcgaccctgtcttgaacttccgctccctacctcatcgctcggccacctcgttagaatctatcgctgttgccgaagagcgcatgacttccatcctaggccggctgactctggaacccaccgaagaccagagctcggacgctggtgaaagtacgatagagagtgggttagtgcgcagtaactccgagtctatgtctggctccccgcgctccttaaaagaagagggccgcagcattcccatcccactagacgagaaaaagtcccgtcaacagcatagccacgagtccgacagtggactaggaacttctgtcagtagcgaagaggggctcgctgattctgaaaataaaggtgggtgtcacatgccccgggaattcattgtttccctttgttccctattgtttcctatttgagtactaacaatgaatagtgaatgatggtattcatgacaatcaatctgccatcacaagctctatttcggctttcgatgttggttcatcgccaaaacgtcaattaggacccgccgcctgcaaacagattgaacgttttgtgcttgtccctattctgaaagagccccgcttgaaaccattccacgcattggcccgaagtgtcccccagcgcattatcaataaacagattgtttgcttgcgcgacctcgagaaaaccctattgtggttggcgccggtaagtcaatacattgttctcttcaatgggtttatggagttctagttatgcttattttttttcttatacttcaaagaactccgccacttctcggaattcttacctcaacttctgcgaatttacaatccaatgcttacatacttcggcgtcgcacctcaacgatcgtgatcaacgactaccagccgatcgaccttatactaacggatacttccttgaccttgtttcgcaggtccgacgatacgcagcaatgattcgcgctgaacgcgagcgagtccaggcgactcaggactccgagactaacaaggagtccaccccttctatgtatgtgatattccattcgatttggacagcagagcctagctaattcaaaatagcatcccgaaggctactctggcaggcggtctatcccagaatgggaagtctgccgaacttgtaattacgcaagacggaaagcaaatctctctggccactggaaagccctacgaggcggatgtttctagtactaccaagcgtactatcaccctcgatgatgcaatcgatgagggcgttgagcgctctatggcgcgccgcaagaaggatgcccctcccatgaacatcaatcaaaaatgctccgactgcgacaaggtctttaagcgtccctgcgacttgacgtaagttgtcctgttgaatcgaagtgtcggaattcaattgctaacccattcataggaaacacgagaagacacacactcgcccttggaagtgcgagcactctgactgcaactaccacactaaaggttggcccaccgagaaagaacgtgatcgtcacatgaacgataggcattcggaaaagcccactctctacaagtgtcaattccacaagtgcccctatgcttccaaacgtgccagcaactgcaagcagcacatggaaaaatctcatggttgggtttacgttcgctccaagaacaacggacgcaatggcagcaagcgaggctcttctgtccaggccacacctcagactcccagtgtgtctactcctgcttcgaaggcaaccgacttcgcatcgccaatccctggtcccagtccttcacctagcgaccaggcctacaactggcctgagaatccccagttcaacttcgctgaccctcctgcgcttgcccatggggaggatttccctctattcggagaagcatcaccctatttgatgaccgacgttaactcgttcccaacatcggtgaatctgagcggcttccagagtcaattcgaagcgggtgacccgaacggcttgattccagccctggagatgcaccgccagtccatgaactccatgtctattccatctgccgaatcggttcccgacttgatgggacctgtgtcctttgacggatccccgctcaccggcacggacagcatcaacttcgacctggattggagcaatctggactatccaaccaacgaggactacactgcgatggctgcacagcttcctcaggctcatgccctcgaggccatgaagggttattcgaatgactacgaaccaatgaacctcagtcactgttcctacgatgcctctgggaagcccaccggcctctcccccggtgcgcagggcaacgccatgttatattcaccggattcttgtaacgtcggcgacactctttctgagcgctacgaatatggactccaagcccaggccggtaacgactttaccctttataacagcgctcagatggctcgcggcgctccacccatgatgcaaactcctcctagcgaccactcgcctcaataccagcaccctcaacagatgttcccctcactcgagcatgagcgcgctctgcagaacatgcagacctggaatggccagcagccccagggacactacctgcctcgggacatggagctggaatttatgaagtaaaaaggcgggattttggggtgtctttgcaaattttgttttctggagcgcatttaatgttgtcagcgatggaatgcgggttttccttattttttcatatttgattgagcttaatctttccactctaaataacatggctgaagtcctgattttttactttcatattgatggggtgtcatttacttttacgctttgaaataaatagatgaaatgaatttttctatccaactgaaagagatacatatcgtagttcctttgcctcgtgaatacttgattcatttcaatcatggccaggctgtgtagcaatatatgttcctaaacatcacgccagtacacgtagagattaggtagttaattgaatattgactcatcccaatcaaacgccctcaaaccatttaagctccaacgcctgacgcgccgtgatcctttcccccggatcaaaacgagccatggcacatacaagacttttgaagtcatcatcaacaccattccagagtacgaacggctgacgcagggtctcctggttcaatccatcccaagtgacttcgaaaacgcgaacccatggattatcaccaagatgcttcaagaatccattgagcccgtcttcatcagcgaagtaagagatctggcgctcgattacgacagcgatgggatcaacgccctcctctaactcatcttcccgaactgcaaaaatgatgcgcttatgaacggcacagatgcacttgatgaccagttaccagctgcgcttaggaaattccgaatgtgggacttacaacaagagcaaatgagaacacatctgaaggtttgttgacaggtcctcttgcgtgggcttcgggactcctccacatccagttgccggcttgtttcccaaccatatcgcatcctggggggatatgagctgcatcttccagatttccgagttgaactttgtcgacgattatcttgccattgcgatcctgccaattgatgaagacgttgtctggttttatatctacaagaataagttgtaatccagtattccagggaaatagcagtggaaatacctgtgtgaacgatatcctgatcgtgaagctgagcaagcccggtaagggcatccttaaggattttcttggttactggcaggggcaagcccttctgagcaagagttaagaggtgacctgtgaaggtttcgaaaacaaacatagacttgttggggatagtgtctacagtaaggcggacatggcttgcattgccacgtaggcgattattgacttcttggagatcttcgaagtcgatgggatgtatgtactttaatatgaaattttgaccatccgctctaaatgtataagcatgtatgtaaatatagggaagggttggtgtctactaacgaggcacgatacacttgacgcggtggagaaacttcctcctgcaaaacatgctcgatagtgtaagtgcgaccggataggcccgtatactgtgtagaaagcagagggttgcttgggattgtgctaattgtgcgatagaaaagacgatttggtactggggacgatgtgcgctggagagggcttaggtacgttgagcttttgtaaagacgactcgctagaagagcggccttcgtgccaacattggaggtagaatacgtgaggatatagtttaataagtgctttggataggcgatgtctcttttcacatattgtaggaaactggccgtggttgacgaatcaggggaaaagcccccttacctgtggttgaaggcaagaagccgagcttacaatccctgttgattggtggttaacgcgtcgacgcggataacatccttggtcgcatgctatttccgtattttcgccaatgatgacatttattattgctccgctccacaataacaaatagccgcaagggcctaaaagaagcctaacggaatccatgtaagcgccagtctcaacctggtaatgcccgtgtacgtggttttgaagccggtgaatcatttcttcgctcaggtaagggaggggactcttgaagtaagaggccttccttagggatcgaccacatacgacgcttttactttgacgtggaggaagccaaggcgcggcgtggtgggcctgcgaatatttacacgtgacgtcaaggccggcgtcaggtgcagccatttttggccgctggctgactatttcatcattgtatggaggatagcaggatgacatatagaatcttacaatatatagcctttcatagccttgtatagccccaatatttgaggtgtcagctaaatattaaaataaattggggtgacgacatcctgtctttcccgacacctgctccgctccccctccacattgtctttcccacatctttcccagtacaaacatcgcgggacaaagcattccattccctggcattccccgctcttcagccctgtcgacggagtagctccgcattacagccccggcctctttaggcagacacattctgtgcttcaatttgcatcacgtgaatcctgggcgtgcaatttagtctcttagggactcagcttccctctcaagtgagcaggagcattaccgctcaacatgccagacacacaatcgcctgattccgctctacctagcggtaacggagatgccggtgcaaccctgccaacagaccaggtcttgaccggcaagcaagaacactgtaagttagagcatatgatgatgatattccgatttcacggtggctgacaggtagataactggcatagacctcaagcgcgagctcatcgcccgcgaagttcgtgctgaaatcttcgaactaaattctcctaccgcactccagcgattcggcgccccattcaaatcggaattcggtgaggtcgccccggtcgattcggaactgcctattcttcggtatattttcgttcaccacgtccggaacttcccgttcctggatcaagcgcgcgagaaggagttttggcaggataagctacaagttgtgggtgctacgcttccctgaatggaaaacggactaacagttgggaatatagttcttggaatcctttgccaataaacatgtctcatcttcggaggatcgactggaggagacgaagcgccggaagttggcccgcaaatgcgagaagctcgtggagctgatgatggtttccggtgtgccgaccgcgtcgggatatgaggagcgcattcagttctcagagatggaaatcgtcgagcgtggtgctcaggattcgggtctgctggctaacatgcccgagggtaattcaattaatggttgggatgtgaacgtggccgccgtccggacaacctctgtcaagcggacaatgcgataccatcaacatgcagtaagtttgattctgaaaaatggccttttgggagcgggatgttttgctgacaattaatgttgaaggaatttattattcgagttcggcaccacgacaaaccggagattcatattgggaggagatatggagagtttgtcaagctccacaagagattgaggaccgagctgccaggaaaacaactccctcctcttcctcgtaagaacaagtcttcttccacctcgagctggtggggctctagtgcagatgatgatgcttcgtccctttcatctttctctactcaggacacgagtgcccccgaggatcggctctctgcaccaacgctttccacagggagcgtccggcgatcgctgtcccgaggatcaaggcgatcaaccaagtcaccgcgcacgtcaacgagcgacgtgtcgagggcgactgtgctgtaccgagaggagcagcgtgtgtcgctgcgcgcgttccttcgcactgcattgcagaatagtcgcattgcagaatccaaggtcatggaagaattcttgactgcgcgccccgtcgagttgaacgaggaagagttgattgatgtagagaaacggaaaagcatggatgctgtgaggatcgaggaacagaagagattctatgagattgctaggcaacgagcggcggagctggacgtgtacatggagcagttccgccgggatattgtggagagcagtaagtcgccagcttcttccggcgtaacatggtttgctgaccacaatttcagatggattaacaaggctgttcgccgagatccgggaaaagccttcaattgcagagctcagcccgcaatatcagaaatttgccgagtggctccgcattgagtaagttatctgatttcctggtgtttcgccgtcctaacattcaatagggttgctgcaacaatataccatctgttccttgccgaggataactcccctgaactgttttcacaggcgaagagaatccacggcctggttccctacacgctcatgaagaatgtgattcgcatcgccaaccctgctgcagtcatgtctggtgttctagaccttttcatggcccagcccttcggctcgcggtcacttttgcaacgcatcttttcattaaccctaaacgaaagcatcaaagatttccaaaaatcaatttcttctctggcttcgaaggttgaagatcctattcttactcagaagctcaagagcttcgcggatgccgaggaagacatcaagaatgagatccgagcagaggctgctaccgacgatgtcgacatcattgtcgctatccttcgctctgaactactgtcgcccgaactcaccccggaacagattggcaaggtgttcaacggctacgtggcttggaactatgccgtggagaacgtagacctggaaatgcaacagggcgcccaatggttcgctcatatgaagcagcttctgaagctctacacccgccagcgcgacaaggcgatgatgctaagcattgttgaggaaccagtcaccctgcagctcttccgcgatctgttcactatcttttacgagccgctcgtccgggtttacaaatctgccaacgtatacaacagcattacggactttgctctatttgccgacgatgctatcagtgtgattgaaagtgcccagcgccaggatgcctctgccgatccgaaccaaacagtgcaggcgttcatcgacctgtgtgctcgccacgaggccaacttttacaagttcatccacgaagtgcaccagcatgataacggtctcttccagtctctcatggcttggattgaggagatcctcgatttcctgcgcaatggccccgccggaggtaaaatggacatcaatgctttgttccaaggagctgtcggagttggccagatcgacaaagaccttgctctcacggaaatcaatcagcttatcaagtggcaagaggaccggaaacgctggcatctgaacaagactcgccagaagatggctgctgaaggtatatctggggaggctatcccaggagctgcagccttcaggggcagtgatttcggtcttgatgaggtgtgtttttctttgacttcaatatggatttggatttcaggctaaccagtttacaggctgatctagaggacctcactatctcggatgaagcatctgaagcctctgatgaagactctggagatgaggacatggacgatcccattgccgtagagcgccgccgccggtcaaagaaacaggatcagcttcgtcgcaccgcgggtgaacctgtcaagcccgaggtcacggagattctcaagcttgctgatccgttcggtgccatgttgcggcatgtacttgctgattagacgtcgatgttagaattattttgctacattcgtgataccgccatagatatggcttctcccgtttgattcccactatttgattttgttttcatacaccgattcattgcttgcttctatttcttggttgtgctgagggtggaaggactagatagatacagcatatgatcgggccgcacaccagatgcgttatgataattgagaccataatattcacggttcactgtcaatgtatctctgtagcacctccgcaacctggcgattgccatattccaaggccacggccaccggcgtcttcccctctgcatcactcaactgcaaatcaattccatccgcctcaaggagtattatcacaacacccaggcgaccgctcaatgcagcatggaacagcggtgtccgacccttcttgtcgcgagcattaggattagcccgtcgaggcccagccaacaaccgccgcacgatgtcctcgtggtttctttcggccgcgattcccaacggcgtagtcccatgcttgtcagcaatctccaggtcaaccctgccagaatcaagcaacagcgccacgatctcgtcgtgtccatgctgcgcagcaacaaacaagggcgtctgcttcgtccaatccgtctgcacgttagggttcgtagccttccactccagcaaaaactgcacaacctccaaccgctccgccgaggccgcaatcgcgaacgctccccggccatactgtcgttcctcggcgttagggtcgaccttctctccatagcatttcaccatgtaatgcacgatgtcaacatagcccatgacagccgcatagaaaaacacatgctgacactcctcttcgccatcgtccccctggataatcaggcgcaggtggtcggcaagcaacatgcccacgtctccatcaatctcctgcgcggcacgactgagaggcgtccatccctgcagatttcccacgcgcggatcagcccgtccgctacagagaagcagggggaccatcgcgggctggtagttgacggcaatcatgagtgcggtatcgccaatcttgtcttgctggttgacgtctgtacggctgtcgctgagaagggtctgaacaatggctatgcagcactctttgacggcccaggacagtggcgagcaaagccatttgtcatcgggggtgttcgggtttgctttgtcgtttagcaggagcagtttgagtactgcggggctgttgtaataagcggctagcaggattggggtgcagcccttgagttgctggcctgtatttatctctgtcttggattcgatgtcgaagcctgcggaaagagctttgagggctgttgaggtgttgtcggttgttgcggcccagaagagggacttggggttgggagactttgcatcgcgcttgtacaggtctgtgttgaggagactgtaggttgctgtggtggtgcgcgcgaacgcatttaggtctgatagtgatggaaggaactcagatatcgcgaggtatagttctttggggatggttgagaagggtccctctttggttgtgcgtggtgcactcattttcgcgtttagaggggtatgcaagaaggaggatttgattgtgggagtagtaaacgcgtgagtactttaagaagcgacagcacgtgctgtcaaacttcagatgatttctttatacatactaggcaagcggcgttgaatgggttgagatcaaaccacagcctcaacaatgcatgtcaaacagtctcttctattcaacctgattatagattaccatattatcccctatatctatgttctattcatagtacatcttctattcatgcactgttaacccacctaaaggattttatagatcttctgataatgccaagacctggagtctcgataagagataagccagtttccatggcgacagcgtcatcttccctcttcaacatttgggaaaccactgtcgcaaatgtcgtaccctcagatataccaaggttctccaagaactacttcacgccagaaccgtggcctcttcagagatggcctttggtgctgtaactgcgcggatcggccagtcgctgtccgtcgtgaaactaagaggcatgggccaaatttagggaaatggtgtatgtagaatcttccgaggttctcaatgctcggaaagatatccccatgctcgataaaagtcagcgactgacatacaaaacagtttggacttgcgcacagtcgcgatgcagcttcttcctgtgggcagctgacgctgtaatccgcgaacaagcagtcgttcttgccaactctcgatccgaaaccgactctttctcgatcactccatcaaagcgcacaccaggccgtatgaacaatggactgattactccacaaaccgagcgcagatttatcgacaccccgcagcgcaacttcaagtcgcctcccaagacagccaaggccagaatgatctcggaagcgtcagacgattttggctggaatgatgactcggatgacgatgagcttatcaaggcactatcttccagccagaccgagaccttcatctcgcaacccaacttccaccccgactccccgttcaagaccccccgcaccgccgcggtgacctcacccggaaagcgcaaattgggcgaaatcacaaatgataagtcttcctacgaccggtctgcacccgcgacgcctttctcatcccgctcctcgcgcaccgagatgtttccttcgtcggcggaattatgcatgacacccacgcctagcaagtacaacgatgtactctctgcggactcgaagtttgacacctcggatcttgcaaagagtctactcgatatcctggagaaacatagtgttgttttgccaaacagagcgcacgacgaggtgctttcgctgcttaaccggcaggatttgaagacacgggggattatccgtgggcgggatatgacgcggctggcattgaagaagaaggatggcgagattaagaagctgcaagaccgtgtttctaatctggaagctcagagggaactggatcgttctcttattgaggggatgaaaccctattgatgtcacctttggaatcggattgcacatccagcgaatactgccaattggcatttgcattcctactataattccggctcagtgttggtcccatctcacgaactgttatgatatgatagcttgcgacctgattattgtgttatcttctcagcattttgtacagcagggaattatgaccgtctttcatccatatatacaattagcatgcttaatagaaaatataagctttacccggccagtgaatgatttcgtcctacatctcacatgttaggattgtatagatctagataagacgtcacgtggctgataagaataaattatcgcgccgcaatgcgcctcgagcttccagcaaggaacaataccaataggccgaaactgaatactctacctccaatgacccccacagatgaagcttccaagcaggctactccccacgagatcgccgacatgttccgaccccctgtgaatcgtgcgatgcgcacactcgaccggtcatttttccgcagaaaggtgcccctctccgtcgcccgaatttttaaagcaagcgatatctcgaacgtgcgcaaggagctggtcaagagccgcgacatactgctctggccacgcattagtcctatccgcgaggcgaaggatgaagatggcaaagtgtggaaggctatgttgttgcgcgagaacctgaagttggatggtaggtttgttgcctggatccgctaggcttgatagatacatgcatggaggttctaatatgtttatagataaggctacatggtcgcctactatcaacgagcttgtaaataagggaacggtcgccttggggccttatgaattggaattggaatatgaccattggtcgtacggtatgcttgacggatgttccctcggttcagtatacatgctaaccttctcatagctgagataatctcatcgattcttcctgaggacctggaagagattcctcaaggcttcactcaagtggggcatgtctgtatgttcgtctgagtcactgctataaccaatactgacgaaacagtgcatttaaatctccgcgcccaatacctgccatataagcacatacttgccgaggttcttatggacaagaacccgaccgtccgcaccgtcatcaataagaccgaagatgtcggctcacacagccagttccgcaccttcccattcgaactgctggcaggcgagaacgaccttaatgtcatccaacacgagcaggactgcgagttccggttcgactacgcccgtgtctactggaacagccgcctggagaccgagcatcgccgcctggtcgagaagtttgagcccagcgagatggtctgcgacgtgatggccggcgttgggcccttcgccgtgccagcaggccgcaagaagatctttgtatgggccaacgatctcaacccgcacggattcgaagttatgcaagatgccatccagcgtaatagggtgcaagatttcgtcaccgctttcaaccaggatggtcgggagtttatccgttcgtcgggtcggtcgttgctgagcgcggagccgcttaccgttactatccacccgaaggtgagcagggagaagcagcgcaaggttgcgcaaggcaacggggtcccgctccccgcgccgaagatatacacccgtcctaccgttgtcaatcactatgtcatgaacttgcctgctacggctattgaattcctcgatgccttccctgggctctatgctggcgaggaacacattttcgcgcctaacacggagcagaaattgcccatggtccatgtttattgtttctcgggacactcaactgacgaggtggatgatcacattgatatctgtgagaggatctctgagcggatcggatacaagatcactattgatgactgtgtgggaggcaagggtaaccaggaagtggaactcgctattcacaatgtgaggctggttagtcctaagaagcagatgttctgtgctagcttccgtctgccgcgggaggtcgcttttcggaaggtatagagttgcatagctgcatgtgaggcgtttggacttctccacaaaaataaaactctgataccctaagaaacatctatcaagtattggtagtaataaacaagtagtaataaataagtacgagctgccttccatcggagttaaattgtattgatgaagcggtaccggggtcaccgccttgaactgccggaagttcaactgcagagatcgccaaacaagtcacctcatctttttacagcaaatacacggcgtcgacgaagtaacttcgggcaagttacttttacaaacacattcgattcgaagcactaagctgcatacccgaatttacggaatcccgcccttcaaaccacacaatgagtgtccaactacccccacccacacaccgcaagcgcgcgctgccacaaggcgagctcgaagccgcctccacgctcaagctaggcgctgaccaacacacacacactctctcgctatccgaagcacgactcgttatccacaaggtgttggagaacaagcggcgcggggggaataaatacgaagagccggagtgagtggacagacccgacgtcgtggtcggatattcaatacttacttgtgatgtctacaggaacctgaccaagaccttggattacttggacgtgtttgcgcggttcaaggatgaggagaatatcaaggccgtcgagcgacttttgaactctcacacggaactggagatgtttgagcggtcacagctgggtgagttgatttgcactgccccatcagccaagacatgacattattccatgtacttttacctggatagattgactgactcgggtctctgaacaggcagtttatgttgtgacaatgccgaggaggccaagtctctcatcccgagtctccagaacaagatctcggacagcgacttgcaagaattgctagatgaactgaccaagctgcgcaacttcaccgagtaaagcatataggggattgcattttgaggatgtttcatttttaggagcatggagttttgacggtgttctttttttttttttcagtgatcgattgcaggatgttggattaacaggccataggtactcgggaattggtgattcataatagaaacctcccggaccaaccattgccgctcctttcttattacatcttctgccaagtccgtgctcttccgttcgccacagtagcattgagcatgtgccggggaacaggatcttgactccggggtgttccactccggtacaatctattttaatgtattgtattacatatcagattgcatagcggtcagtagaaatcggaacaacacggaggagatgcatatagtgcagatacaatatagtacatatagatagttagccgagtatatatctaatgtacatacaacatgtacgtacatagtcttagcctccctccacattgcgttctccccacacagttcgggcgctactgcgactttagtatgggacggacggtgattggcccggtggaaaggcgttatcactggccgctgattggcccgggcgatccttggacagtcgaccagtcagaaagccaattgacgcaggaaaaggacgaagggagctatgttgtaacggtgatatatatcattcgccctaaaccgccctagatacagtttgaccaaattcaatctcacttccatggatgccctacgtgaaatgatgacctaacaatattctgtacgtaatgcaatgtctgcattcagaaccaatcagcaagggaccgcttatcgttgacaattaaagtgtcataattgcccgtcaatggctgctcgggcgggtttccgttacgagagcaaaaagctgatcgtctggttgtcgggaaagtaacgagtttcgggattcatccatagtttatattacctattaggtcgatatgtcattgatttccctcttttccttccttctccctcacttaccacatctcgtaacggctaggaatgacggagcgaactattcgacatctcatcctgctgcagtcacttgcaggctcatccgcctgatatatctctgatctccggtgccggctctggattatcagataacacacctgttttccctgataagcgtatgtgccgggcttatcacgacgtgatccaatgactgacgccgtatattcagaaaaaagaatcccaagagattgcggagttacacgtctggagcacaactccgtgctccgtgaagacccttatcaccttcgatctccgttcctatttgcccgtgcctcagggctagctccggtccaccgtccacatggctaccgttatcactctccagccgggatattcccaaacccattctcctgatctccgccgaaagacgggctcgaccccagtgctctctccatcccccatctccatcaactcgaccctcccccgcgcacggaatggagccagctgtgacgcctgtctccgcagaaagagcagatgtgccatgaacgaaatggtcaataaatgctactcatgcgactttcatcgccaagagtgtaccttctcccacactcacgagggtccgtcgaagaagaggaagttggacggccaggagcctgcagaaggcattaagcggtatggcattccaaccgggggatatacgcctcgatatgtagaaagaaatcgtgccctaacaatccccagaccttcaatgcagcactgtatccccgagacggagtctcacctagcagtgaacatgattcgccccgggttttttaaccaatcaacccagtatatcggcatgaccacggagctggagcccaccttgctggattatctgccactggacgaatacgacgaatgcacggtggccaactcgcgcgtgcggagatgtgccgacgacggcaccttcatgcgcgtcgtcgacaccgtgccggactcgcatgccgtgtcactcgatgctatcgagagcatggtcgctccctacggctccacactgatcgagaagttctttgagcacgtgcacccctcgttcccgattttgatagaggaagtgttccgccaatcataccgcgagcgccgtggcctctcgccgctactcctcgccgcagtctacgtcttgacgttgaagtttgtcgacgtcggtgtcacctcgcaaactgcgcgtaagcccgatgccgcacgactagaggcttcggccttgaagctgttgatggattcgttgcaattccccagtgtatccaccatccaagccgggctcctgctgacacaaaagtcgactctcgctacggcatcgctaaacggccagctggtcacggccgcgttcgagctgggtctgcaccaggactgcacaaactggcgtatggagacctgggagaaaggcctgcggaaacgtctcgcgtgggcgttgtatatgcaggataaatggtcatcgctggtgcacggccgaccctcgcatatcttcgcgttcaactggacggtcaaggatctcgtggagcaggacttctcggacgcctttgcctccggcactgactcgtcacacgatgaaaccgccgtcggccacggccctctgcttttctgtcacatggtcgcactaaccaccatcctctccgacatcctcgaccggttctacaccctgcacgccatcgaagagttctccgccgccggaaaccagcgcacacgcatgatcctagaaaaagccaaaccagcccaaatccggctcaaagactggttctcctccctcccagcatccctcaaaatggaaacctccaccggcgaactcgtcgaaacaataacagacgaacacgcccgcaacggcgccctccacctcgcctacttcgccaccgaaataacccttcaccgctgcatcgtccgctccctcctcgccgaaggcacagaccagtacctggcacacatctgccgctccgcagccaaaacccgcctgatctccgccatggacttcgtcaaccgcctgcgccccgcccacctccgctcgttctggcccgcctcggcccgcaccaacttctccctcatcggctccttcggcatgctgctccgcatcaccgcgccgacaaacgaggaggctgacttctaccgcgtccggctgtgcgagtaccgctggacgctaggcgtcagccacaagaacgccgagttcatgggcttcgccctgcagagtctggacaacgccaccgcgctgcacaagcacgtccccgcgaagcctggtgtcgccgagctgatggcgtcgtctggtaagaatgcgccgccgcgcatgcctcctaccacgcttagctcttatgatgacgctatgatggaggctgctggcacggccgcttcgagctcggttatgtcgggtctggcgtcgccggctacgtctgttagtgatatggaggatggggaaggggaagcctctatggcgcccctatgatgatgatcccgtcaacctctctcccatctcttctcctctcttctcttcatataccttactccgtcccccctcgcatcccttacctcatttccagccctttctttctttcgttgatgtcttctcacgactcccctttgctacggcgttttctccggaatttgatcttgttcttgatttcctgggatgaagcgcctgatttacctatttgaaatgattgattatgttgtgcatgtacccccatgtactcactgcttgccttgccccgcagcgacactaaaattcgttacctactttttgctatgacggaattaccctggctttggaatgaatgcatatatggtctggattggaccggattttgttatgttatgctatgcttgctttgtttcggggtttgttttcgccattgttattgttattagacagcctatgtatatagagtggatgatatgaattatgattttatttgacgatcctgttcgaggacgacaccactcaataacgctttcatttcttgctcttcacgctcgcactatttttttggttttcgtctgtggcggtgtgtggttgaacacaacgataccgtaacaggcaaaggcagaccatccgatgctgactcgatcaggttggcgtccgttacttgccaaactccccagagagagatggaccggggtttgcggatatcatcgagtgttggccagtcagactgagggatcctagtaagacgactgtcagtaatgctcgtagataaaggaaaaggaaaagaactcacattcgatacgacaagaatcgacttgtccgacgggatagttatatatggttgccattttgagtatggcgtttgtaggacactcaacacagctcctcatcattggcagcgaactacttgactagctgctggtgctggtgctagtgggcttagtcttggtcaggtattttcgggcgccttcagacgtgttggtgtgttatcggagctactgcagtgatatcattgagacaagctttcgtctccaggtgtcttatcggggttgttggtgtcaagactcaagactctgggatggtattgtcatatggcaccatcgactatggttttagtcacatcaacttcagcacatgaatatggctgctgcatattgcacggctggggcatgggtggagcaagccaccattgttcaaaatgaacagcggtcttcttgatagatatgataaccactatgtttgcttctcttagaggctctgaaccatcatctagatttcgaagaagtcattgcaggctctcggataagcccgtttcaacaacaacggtaggccattgcaagctggtactagaaggccaacgtgaagaggggctgaacagattgtagcccaattgggcagtgttgttagactgttgattgttggatttggatggtcttgagggaagactcgaggttctgactttgtcactggatagacgtcttgggtgcgatccgggccattgacgacttcaagcgtgttgatatcttcagcttgagtttctgtgaatcatcagtaaatatatgatgatggtttaaaggaaacctgaaaggacactcaacaggacctgaagaaacatacctgaaaggatcgctgaaaaggtccaacgaaaggatgatgggtgatgggtaattggtggcgcggctgcagcaccacctaaatagatatatgtagcactggttaccagtgccgcaggatgagattgattggaatcctttgtgtcatttggcagtcgggctgtttcatgattagctagagatacggtctgaaggtggcactagccatgacatacatagtagtccgcgtagattgcaaggaaaggcagaccaaatgcctagagaatgacttgggtgacccattgcccatcggtctctctaaacatcgctcgtgaagtcgaaatacgttggtcaatgcgggtgtcgatgaaaagaaaagtggaatttggggacccttctcgaatgagatactcctagaatgactcggacatgctactagttgttacactggtagcaaaggagggggagggggagggggatgacgaagaagtgtgttgaagagagtgaagagagttggtagtggtgtggtgaaataagagatgtgaaagtgaggataaagtgtggtcacgtttaccttaccttggtcttgtgtttgctaagtgctagtgtatttgctgtaattggtggtactaatagcagtcttctctcagtaataagcgacggagaaacataggctgggatgatcttgttcatttgatacgcttggtatactcccaactaaaagaaagagaactcatttccacctccaaaggcaaaatcctccaaaacactcggatccaccaaattggccagcatctccgcccgcgttcgatcaggttgtgtctgcgtgccgttgctgaagagtgaaaagaagaaatccccgtcctctggatcagtatgttggtccataatagatgatggggtgtcgagggataatccgtgcgtgggtgtaaatgatgccgctggtagaccgacctcgcctcctgttggcgttgaatttggaattggatgcttccgcgttgatgtggttgcatctgcagctgcttgtgatgaatttgagactccccctgatgatgatgtgtatggcactccgagtctagagtactggctttggttttggctgtcttcgctgtggttagctccgtaggcagagcgccgtcttctagccagacaagtgcgcgcaacttctagtacttcacggagcatctcggcgcagcgacgggcgacgataatatcgcccatggaggagaagatctcgagggatttttcgacgtcttcgaggagttcgtcatctgggagacctgggtagtttgagaggatgagatggaggaggatcattgacccgtagagtgcgtaggttgtgttgtaccacctgtttcaatggtgagtttgttaattgtagtttcttaggaggaaaaggtggtggctgaccatgtgcgaatgtagatcctatgcatgaatgactcgtattgcatattgatactcatccgggcagcattgaggcaagtatgtagatgggcagaaaggtctggcgaggaaccgtctgtatttgcagttgctgccaaaaggaatggcttgtggatgaggattcgagtattgtaatatcctagacatggtacgatcaggattctttctaggatctgctaaatcggagcacggatcatgtagagggaactcactcagccttaacaccaatttctgtttgaacgcccattcagggtcattcaatgcaagtgcatctagatccaagaaagccggcagtgtcgccttccattcaagaagtcgctggtcaagtgccatagccagacgggacttatcggctattgaccgccgcatggagtggtacagttgatgagatgcttcagacatgatctgggctagggcaaccatggccgggatcatcgctatgtcattgtcttcggcatcagggtcgaagtcatcggtatcaacctggtactgtcagggttgcaccgtgcgaattgaggatggcacctacttttagcttgggaagggaggtctggtaataatgcaacgctttcatgctatccaggcgtccagaggaacaacacatttctctaggatcgacgttagtatcatcttcgggagtacgatccacgagatagacgctcacatctcatgagagtagatacacctaaatagaagcgtcaggttttttattcatcctagctttatgttcatgcttaccaccaggtacgcctagcttctcgtctcgcactgggaggcagagaagacatgctcgaaccgagaccaatagccgctgctgtgcggacagccatcccgctatacatataacagctatggggctgcaacgaattttgacgaaacacactctaggaagacttgtcagcctccttctgatgtaaaatcgacatggacgtaccaaaagaagaagagactgggcagactccaaacaggaactttcaaaaagatcacccagagtccgttttgcgaggccgaagaagtacttcgcaaagtcaagggccgtgaaccccggtcccccccgagctcgtcgtgtttgacttggatcgacaaattgctgacagaaatgttgtagtaaggaggtctcgttcgagcttgcattgatcgcgcccagagcaacgaccgcaaagtatagcccagcaaatttcgtggtacctcggaaaagtccctggcgatttggaactgaccatgcttcattttcacatcgttgcataaaagtgcctttcgaaagtagtgggtggatgtaatgcttgttcacaaagtagctgctgatgaaggttttctcgatctccatctgcgcaatctctgtaaggcggggaaataaagcttctagactgatgtcttggtctgttaatccggtcagaaattcatacgggctgtgataggcattgaaagacaaagggaaatctaccattattcactggaggggtcctgttttcgagaccatctgcatctggcggacttctctgtgctgcaaagtctgtcccatcatgggattggggcgaaggatgcccgatatagtctgcattgtaaagtaaattcacgatggagagttgtgatttgcctgacctcctgctacttttgtggctcgtttctcgcgataaaggctgagattgaggattagtataatccggtgacgccggaatttgtcgaggagtctcatcgggacgattttgatatctgagctcttgattctgtgctcttgcgtatagattacccaggaatgccaggtttgacgagttaccatagaactcggtcccattagtatgcagattgaccccacttagcccatctcttgacgcagcatcaccttgctccgaatttggcactatataggtggtcagtttagttattcgtatcggagagggcggtgcccactttgtgaagcgtcggatcgcctagccgacgggatcgttgatctgggtgggttgttgacagcataaggtcggcctctcaacaaacttggagactgggcctgcgaagaagcagtatacggcagtgacttttcggggtcgttcgtgccttttggtgtctcggtctgatatatccccggccatggagatggcctggcgctactttggctttgcccctggttagagatgctcggaaaaagatttgatgaaaatcccaacctttggtcggattctgcaatatctcgttttcttttatttgaatcgatgggggttccgcgcccaccagacgtgcggaatacgcagtcaaacgagtgatctgtcccgggtcaactactacctcggcatttcaatacgtgggactaatacatgcgcaataagaacatggttgggcttgatcacactattaattgtcagagtggacttgctttccgaaagggaagctaaaaagagactgcaatttcaatgtgagctttggcttaccttggtcttccgagcacggcaggtttcacatgcccgcgaggcccgcggcgcacgacgttgcgaggcccatcgtgctttgccttcaggcgcgtccatgcttattatagatctctgcactttgagaagcggacggtgatctcccctggcctagtctaatgagaaagaaggtgttggcccgagtggaagtggaacacccctttaccgaaccaatcgccaatcttcaacttcttcactttgcgtggggattttgcggggtctggggaaggcatttggtgttaaggtctgtttggaaaagagaatggaaaagggaaaagaaaaaaaatcatctgttatgatctcactactactgggatatacatctaggacccagccatgatccatatgagaaggacagctacttcctatcgttacagacttggaatatagtattggaatattaagtctacttaactataactagctttgacttttacttattaaagaataagtttgaatgatttgaataccaacaccaatgtcccgtatgctgttccgacggaaggcgatcttccgacggatgatatccgatatactttgctcccagcacattcttcgaaggtatagttagtatagagtatattatataaaagcttaccaggcagagagtagttaaatagctagtacatgtacgcagcggccgcagcctgactagagaccccacggaaactcttgcctaatgtgcggtgtacttctattaggtctacatataaaaggtacacccggccaatcatgaatctcttgactctcgaaaacagaataattgtacactcggaatttgaatcgtgagcatttaaagagatctcttctacaatagatgatctataaagaatgattcatatagcatgaacattttcggaggctgttgttgacccttcgttctaagaaactgattggccgtaagtactccgtgccttgatatcttatatcaagcaagagtctccggttacccaacttcctatatttaaacatacaaatcgagtgcaactggccaaatgcggacttatctccccgacggaagccgttagatagcgggtaaacatggcgagttggtatcagctgctttgagtcaatgcacctccaacttccaaggatataaaatgagcggtctcttctttttgataggacattttgtatctaatacttactaaatattataacatacttcttcaatataacgtgcctcattcctcactattgatccgatcagcattcacaaacctcaagatggccttcgatcagaacactttgcgatcgcgcttctgtcatgagctttcggaaatgtacaagagcgaagtccctctttacggcgatctgatcgatgtagtctgggaagcagacgcaaaaacagtccaaaacagccagaacatcgacggtgctcgcgttataaacccagacgatattctacccgcccggcatcgggttgaaagacacggagcaatccgactgggaacaacgcatgagctagctacaattcgtcgcatgtttgctgtgatgggcatgcacccagtgggctactatgacctcagcctcgctggattccccatgcacgctacggccttccgaccaaatacccaagaggcgctcgataagaacccatttcgcgtgttcacgacggtcttgcgaatggatcttttgacagaaagaacccggaaactagcacggaaagcgctagagcaaagagacatcttcacgcccagactgcttgctctgttggatatcgcagagagccagggttttctgacaccagatcaatgcacagagctcatcagtaatggtctagagacattcaggtggcactcaaaagcaacggtcagccttgaagaatatgagcagcttaaagctgagcatcctctgattgcggatgttgtctcttttccaaactgccatattaaccacttaacgcctcggacgattgatatcgatcttgtacaacgattgatgttggatcacggcatgcctgtcaaggatcgtattgagggaccgccaaaacgatcgtgcccaatccttctgcggcagacaagcttcaaggcgctggaggaaactgtatatttcagggatccgtctggtttctatgtgaagggttcccacaccgcacgctttggtgaagtggagcagcgaggctacgctttgactcgagaaggacgccatctctatgatcgaatcttgaaccaagtcaatgcagaagctgcgaaggatgacttgaaaggagaggcctatgacaggctactagaagagcgcttcaaggagtttcccgatagtctatcggaccttcacgatctgagactgggatatttcacctatcagttgacaccaccgggcgatcagtcggttaacgaaagcgttgtattatcggagcaacttccttcaatctcacttcaggatctactcaacaaaaagatcctgagttatgagcctatcacatacgaagacttccttcctttatccgcaggagggatcttcaattccaacttgggtggtgtctcccagtctaagcaactgataatgagcgcggatccggacctcgatggtttccagcggctccttggggcatgtgttgccgatgagttccatctatatgccgagatgcaacagaaatcgttggaaatctgtaggcagaaactgcagttgaagaagattatagtgtaggataagcgctttgtgataatgtgataatagcatctgtttcaatcttcagacaagtagttggttgctctttgatattcacgtttatagcgagcatcactaatggcatcaatacgaagtatcgctgctgcttcacttctacctcgttttcggtgttgtcagatgctttcattaggtcctccgggcctcgacgatggtatgccagtgtatggtttatgcatttgccgagaagactgcgatgagattgggcttgaatgaaactcagcgttcatgtgacggtgacgggccctacactattgcaatagagagatcttcagaaaagttcaatactatagaatacaatgcatacggaaaacagccatccatctatctgtacaatatgccgcaaatatatcaatgcatcgcggcaagacaattaccaacagcccaaagatcagaccatatctcgactagtactgtcaatacctcggaccactgtcgtgtcatggtccggcatcagattttgccccaaaagcttctcccaaacaccgaacaacccaattatgaccggggttcaattactgagctgtccgctgcgtcatccacgatcaccgcgccttccgccaacaactcatccggcgtcttcacccgcacatccatgacacgcatgagcgtatagcggtgcttgctcttggcctgcttcacgtgccgttgtctccgcttggtcttctccttgatgcgcagcggctccgcatccacacccgtcacacgaacgcggcactcgtagatacgctcgtcgatagtcggtgagcccttcattgtgaagtcgcgggatccgagtgccgaagcgcggttgaagcgcagaatatcgcctgccttgaccttaggcatgaggaagggcaaccggatgtgatcaccttctgtcaagaggtatggtcgtgcgtgcaattgagcgacgatgtagtgcggcttctggccggcaaggtggggaagctgtgacatgagagatttggtcacttcgagaggggaggtgaaagtcggggcaacgggttgttttgcgatgggaacgtgtgcgcgtgtttggggtgtcatgatggtttcgtcaaaagtgggagccttgacacgagtcttcggttgggtatcttgcgcccggggagtggcactgagaggtgattccgggtggctggaagccgattggctctgaggttgcgagttcatcaaagatgcactctggtgaaagcatgctcgttgctgcaggggagcagcggatgagattgtagatggtgcagtccaacgcacttcggaggccaggccccgtagagcagatcgtgagaacatagtaattgaccgcttgtcaatactcaattatcgagagtgagagtggttcgcagtggtcgatattcgagatagaagagcggcatccccgtaactagagaaattcaacttgcgcgaatggccgctttgtcgcccgtagcatcacgtgattatctatcagtgacttgaggatgcagatttgcagcgagaagagaccaatattgtaataataaatgatataacctgatagaaagtcagttgccttaaatgttcaatcttctaccattgttcaatatttctttttcaatctgaataagtcgaagaagtcgagaaacgaccttaccgataaggagcatcacgtggttcgctatcttttcccgcatcacaactttttcggtctcgattagatcttcaaggcaagaacttcctcccccattcacctcttgttgtccattcgtcgttcatcatggtaagctccaaatgattctctgacctctcaatgttcaatttcttcatttactaactttttttctgcctatagcctcagaacgagttcgtccctccccgccagccaccgcccgatctccaactgacattttcccaggtatatcgaacgctggcagaagcagcacggcaagcgcctcgatcacgatgagcgcttgcgcaagcgccaggctcgtgaggggcacaaggcgtcccacgatgcccagaacctgcgtggtctgcgggccaagctgtaccagcagagtcgccacaaggagaagatccagatgaagaagcgcatcaaggcccaggaggagaagaatgtcaagtccgccgcgcccgacgagccttccaagactcctctaccccagtacctgctcgatcgctcacaggagaccaacgccaaggccctctccagtgctatcaagaacaagcgtaatgagaaggctgctaagtttgctgttcccctacctaaggtcaagggtattagcgaggaggagatgttcaaggttatcaacaccggaaagaagacccacaagaaggcctggaagcgtatgatcaccaagcctacgttcgttggtaacgacttcacccgtcgccccgtcaagtacgagcggttcattcgtcccatgggtctgcgttacaagaagtgtaatgtcacgcagtatgttttatctttggagggagagcactcaccctccggttcatcttggttggatatggtatattgactttttcttcagtcccgagctggctgtcaccgtgcaactccccatcctttctgtcaagaagaacccccagaaccctctctatacccagctgggtgttttgacaaagggaacaatcattgaagtcaacgtctccgagttgggtctcgttaccacttccggtaaggttgtctggggtaaatgggcccagattaccaacacccctgagaacgacggctgtgttaatgcgtgagttgcttcgatcaattattctattctttatatacagctcaaactaacgtaaaatagggtcctccttgtctaaattgaccacaagcacttcctccacattcccggcaggcacccgcctgtcttcgataccatgctcaggcagttctatatttccctttcttgatacatacggtctcaagactgtttcattcttgggcggtgttaatggcgcaaagtcaagtccattgatttcaaacgaaaagtattccgcatgtttggcttcttaatggacatagctagtttttagatagtcaggcatttatcaactatgattttatgaagaagcagcagctccattgtaaagatcatggatcaaagacttccaaataacccacaggataagaaacgcaatatccaagtaatgaagatagacaaagcttgtcaattaaacatcttaaccaaatgaggagttattgtcactccaaaaacgatggtactcaagcagtatccatccggatgcaggagaaagatgaaaaggctaatgaaatcatatacaggaatgaacatccacacgctgcgctgaaaccgaaattcgtcaaaatacccaccacaagacaacgtggttaggtcggacaatcaacccggaggatgatgaagaagaaagagaagaaagagacaatgcaaagaaacagacaatcagatatcccgcaaattaaccaagcagaccaagacagaaagaaattaatatatccaacaccagtcattaagtcgttctaaccaagaagggatggggaaaagccgataaggcattcaagacaaaggaaataaagtgaaggagcggctgggtgttatcatgcgttttcttcttcgagggctgctttgatttttgcaaagaagcctgcgggccatgcagctagctcctcttctctgggcacaccgcgagccttgcagtggttgacgacgttgaccaggatacgaccaagcatatcctgggtgactggaacagcaccctcaagctgggcatcggggtgcaagaagggatcgcgtgggccaagcatctcctcaatagttggtcggagagtctggtcacgctgcagacagcgcttgagagtccggacaagaccagggggtactggaatgccaccgacaccaaaggccgggaaatcgatttgtacacgggggttggggatagccatgatgcgttcataatatttggcgatcttggcgaatggtggttgtccgtagaccatcttgtacagaatacaacccaaactccaaacatcactgggttttcctaatttcataacttttccaagacttgaaggcaaaccgagggacacgttggaatcaaccaacgcctcgggggacatgtaattaggtgtgccaacttgctgttcacgatgaacgttgactgtattatcttggatcgcatttgcaattccgaagtcaataagcttcaaccggccttgaaccatgaggaaattagccggcttcaaatcggagtggacgatattgtgctcgtggacagcctggacacactcgagcatctccttccaataaaatcgggtaaagttgatatcaaaaacagcatcttcagcgtttaaacggtatgtgagaatcttttcaagatcagactctccgatctccataagcagactcagagcatgtttgtcattgttcagctcccagtcaaacaggcgcaccgcacggtccacattctccaacttcttcaacaggtcgatttcgcccttatatccactcaaagtcactggatcaacatcttcaatattgacacgcttgagagcgaagatcttgtaattctctgccatcacccggtagacacgggagctaccgcctcgaccaatacaatcgagtcgagtgaaatgcttgccattaattgagacttgactcttcttttttcgtgattgtgatgtcgatgcgcctcctgtggatgtggcagtctcaaggactgacattttcggaggaggaggagcggccctatggggggtgttgttgcttcgcgtggcaagtatctttcgtgcagagttggttgctggggtctctgctatatcgttcttctcggtatcgtaaacaacatgatacttttcgggtttatccagcatactcaacccttggggctttgtacgccggaaagttggtggtggttcattctcttggtcacgtaccgatggcaaagccggtattgaaggaaccttgaatacaggttgttccttcgcaatcgaggatttagaggacaaatctgatgaagcgggagtggactttgagccgtatgattttggcgaagatgacctcgaaaacggcccttcgacctcagcagggcggagaggatattctcgtcgattggattcacgcacaagaggcgggcttgggtcagcccatgacactttaggggatgaaggctttgctggattgcgaggtcggtattcggcattctcctcctctccttcgacatcttcccggacaccatcagctgagagatattggtgattttcctcgttactctcttcgctctgacgtcttagcacgcccctccgggctgggccattcaagaaagtgccagcaagccgaccaacccgcttgacacgtaatgagctgtgtggagcgaattcttcgccgccacggccccgcagtgcagaagaaacgccatatcgtagcgctgggtcatcttcatattgcgatttccgatcactatccgagcgctcggcactaccatagtaatcgtccgaactgcgttccgacgagcgctttcctgaaggcgagacagaggccggggatcgggtgttgctgcgcgaaacgttgatacgaacactccgttggcgtggggcgggagtgataaaatcatttgggcggctatggtgctctggttctgcgctctggctatttgataatggagagccttcgcgcgagaatcgagaactcgacgacagagcccctacacggacgactcttggggccggactaccattagatgagtcgtgtggggacgaattccggggtgagcggctttgatgtcttgatgtttcaattcgaggttcgtgtacgtgtgccttgtgtagatgaggcgaagaacctaatccatctccatgcaacaatgcttttacagaagcgctgaatttaggttctgggacctcttcgtcggagctgtccccagagtaatgtttggacatagcttgtgttgaaggagatacccgtctggaacccgagcgtgaaaccgcggatcgggacatcggtcggggtggctgtcggtacagttcattgtatgctgggagggaattcggggatgccatgccgctaatacctacattgaagttgtgaatcaatgcggccccctccaaagttctccaaagttgtcgattgtttgttgatcttggagaaagcccaggctcggggtttcttcgcgggcgcgctatatagtcacgtgcttgttgttgctatggcgacgtctgcaccacaacatgcggacattgaaataattgattctgggcttgaaaagaacattgaacacgaaagatggatataactctagccaataatagcccatttttctctggtaatgtggtccagtaccttaagtgattccaaagccttgggcagttaaagatcggccagatagcctccacttactgctatgtctattccgtagactagactgaacttgccgttgtcgtactctccggctatcaggattcagagtagcctagtatagctttggggtggttgaccataaatctatataactactccaaagaatgcaaaattgtgatatcctcttagattatatgaccttcatagtgcagcaagattgtaaggaattaattctatcactctatgactgtaaaagtactacagagtggtgagttcatacaatcatagtgatcgttcattagggcacatatatacttcaagaaagaaagataaagaatcagcttagcataccattttcttctcattttcttctcaaagaagatataagaaagaaagaaaaaatgattgcagacaagtataggccaacagattagccaagaggcgtttttccccacgtaggtaatggatgtcgatgttctgactgtgttcagactgtcggcgagttcggaggcgaaatatccatctacggcaccggcgagtgaccatgaatgcagttccaacacggtgaatacctgtcttatgtttgctcatcaaggactctcctaccctcaacttggattctagcaaaaatggcgtccagcgtagatgccaagctgatgaggcggactaagttcccccctgagttcagcaagaaggtagatatgaccaaggtcaatatcgaagttatgaagaagtgactttccccgggcttttttcggtatctccggtttactgacattgctttttctccgcccacagatggattgcaagtcaaatctccaagatattggggaacgaggatgacgtcgttatcgagctctgcttcgcgcatcttgagggggcacgctacgtaagtggtgccgtcggatatttagtgtcccaaccctagtttgctgacatgtgcttctgttctagcccgatattaaatctctccaaatccaactcaccggatttctagacaaagataccgccaagttctgtcaggagctgtggtcgctgtgcctaagcggtcaggccaatccacagggcgtcccgaaggaactcctggaagccaaaaagcttgagctcatacaagagaaggtgattgtaagcgtgctctcgaccttggatattttctaattaaattacattacagctcgaggccgagaaagccagcgaggcacttcgtcgccgacgcgaacaagaccagaatcgcgaacgagagctggacgatgtgagacgccgcgagcgaccagaccgtggacgtggaggaagaggtggcgatcgtggagatcgcggtggccgtggaggtcgaggacgcgacttcaacagacgattctcgcctcccagagaccgaaaccgcagccgcgaccgattccgtgagcctccattgcgacgcgacttggactcctacgtgccacctggtaatcggcgccgccgatcctctcgctctccccacggcacccgttctccatctggaaccccaaagccgtcgtccccatctcgccgaaaccgcgacgaaccacaccacagacgacgcgaacgcccaagcatctcagtctctcccgagcgacgccgcggaggagcgagaaggcgcagcagtccggattacggtgaccgtgttaaagcaagacccatttcccgcagccgttccccgcgctcacgttcccccagaggaaaccgccgccgaagctccgtctctcgcagccgcagtgtatctcgctcgcgatcccgccgcccgtctggacgttatgcccgccacgattcccgtcgcttaagtcgcagccgcagccgcagccgcacccctgaccgtaccggtacacgtgatcgtggtgagaaccgtcgacgccgcagccccagcggtgatcggcgccttagccgcagccgcagcaacagccccaagaaggatactgacggcaagcggccgctctctgtggaaagagacaaccctgatgacaaacgacgcaagatggctgatgagaatgaggtctcctctacccgaacccctccgaaagctgatgagccgcccaaaactgatgacagtgagacaaaagttgctgagcaggttggtcattgagaatagagattcctggtcaacctccaccttgtatcctttactacccagattcattcctatttaatgttcgtctaaacaattcacatgtcatttgtttctcaaattgctgtgttgaatgatatactaatgaaccttcaacgctcagactaagaaaccgctttctgtttggacacagtcgactgcattccgtgagaaattactccgggagagatgtattgctatgcgtcgtcaggctgcccagaagccgagcagtgcctcacagccaaagcaggactaaacgagagcacgagtgtgacttgaacgttgaaatttacgccgactaaatgagtgcgttttagcgcggtacatgtgcggagtactttaccattccaattattcttttatcatgatcgacatgctcttttatactgtaaggtggaatgttgggttgatactggggaaggtgacagtctcctaaattgtagctagtcttagccaactagttagtgtgatgagtagttcagattaagatgggaatgtaatatgaaatgaacatgatcaattacaagatatccgaagactctaaccataaccattcaaaagcacagtagattacgatgtacgatatacgtaagaaacaggatatatcaatctccaccgaagcagattagaattagaattatatatctacagagaggccagaggcggagagccggcagatcgggatgggcagccaccaccccacgtgttatcaaaaatcatcttgtcatggaaagggctcaaaaaaggcaaattaacagtattgatgaaggagaatctatatgagagccctcagagtcgtggcttcggaattatgtccaggtatattggtgtctgctttactcgcagccgcagacggtggcagtgacagtcacggtctcagtggccttgccggagccagtgttaccgccggagggaagggtggcggtaacagtgacagtctcggtgacattggaaccagtgcttccaccgctggggatggtggcagggctggtaggggcaggggccgatgcagtgacgccggaagcaccagtggtagcagcggtgccggtagcctgggcagggacggtgacggtcagagagccggtgccgctggggtgggggaccacgatggtggtggcggaaccgctaggggcagtgctggtagcctcggcagggacggtgacggtgatggtggtggagctggagccgctggagccggggatcacaacagtggtaggcactaggggcagatccagaaggaacagagccaccgacaacggtggtaccggtgggggaaacgccggtagcctcggcagggacggtgacggtgacggtggtggagctggagccgctggagccggggatcacaacggtggtggtcgaggcactaggggcagatccagaaggaacggagccaccgacaacggtggtaccggtgggggaaacgccggtagcctgggcagggatggtgacagtgagagaagaggtgccgctggggttggggaccacaatggtggtagcagaaccgctaggggcagtgccggtgactgtgacggggatggtgacagtggtggcgctggagccgctggagccggggatgacaacggtggtagcggttccggtagtggcagatccagcaggaacggaaccactgacggtagtgccggtaggggaagcgccggtggggaccacagcagggacagtactggtggcgatggcagggatagaggcagtgagagaaccggagccgctagggttggggatcacagtcgagctgacaatttccgaggtctcggtggcacagggggtgctggtggcatcggaaccggagggaacagagacagagccggaggcggcgggaacactggcggaaacagtcagaccaacggaggcactggcaccggaaggcacggaggaggtgctggcgacgtagggggtgctggagggcaggctgaggacggaagacgaggcagtggcggcgggggcgccggggatgctgcagccggtgaaccactcgatgataatgatctggatgctgacgtcgatgttgagggaagtgcagccactgaggaaggcagcgagctcagtacgggcgctgaaggtcaggtcgaggaggctaccgccggcagcgcagagggaaagggcaccacggaggtcgacgctgagatcgtcgacgatatcggtcaggagaccagtaacatcaccgaggacaccatcaacaagattgagcgcaacggagacatcagcctcgacagcgaaggagagccaaagaaggacgacagccttgagttcaacgcccagagagcagtcggagctggcgagccagatggcgagcttggtgcggacgtcaagttccacagcggtggcgagttcgcccttggcgcatgcctcgagagcgagcttgacatcagcaccgagagcaacggcgagatcaacgcccaggaaggcggcgagggaggcctgaccgccaacggacaggaggccagactctaggacgtggatgccaacggaggcaccaacggagacggtggagagagcagtgtcagcaagagcaccaatctcaacaagttcaccaccagcacggccattgatccaggcaaggaccgaaaccttgaggtcagcgctgagctcacactcggtgctgttgagccaagcaagcagggaagccttgatgtcagccgacagactgccgacaataccaccagcggcgcagacattcagaccgaccttgatgtcgacatcaaggtcaaccttagcctcaacccaagcggagagggaagtctgagcagcaacgctcaagacaagagcagactcgaggctggcggcctcgaagataccgtcgatagtcacgtaaagctgacccttggcggcgatgttggcagatccggggatgtagacggacagagcagcgaggacgtcggcggagaggactagctcgtcatgaccgtcacaccaggcgatcagggaggtcttgagggtggtgtcaatctcggcgtggagacgcagccaaaccttgagggcggccttggcctttgcgtggatggcaccggccttgcagccgagagcaccacccgagagagcggcagcaccctgggcactcagaccagcgaagatctcaacggaggtgccttcgaggacggtactaaggataccagtcacgtcgagggtgaggtcgccgaggagctcaccgaggagatcgaggttacgggcctccacagccctatcggtagggtaggcgagagccgagctggccagaccggcgagcataacaagtgaagaacgcatgtcgagttttgtgtggtgtattaatgaatgtatagggcaaaagcgattgggagtataacttctgaacacggattatacagaagcgaaagattggacaggcaggcaatagccgccaaaaacgatagactggaaagactggaaagagtggaaagagagaaagacagttgaacaattgaagatccaaagaggtgatcgccatggttgtttatatacccctgatcaactgtgagccgggaggcttccgggtgtcgattgggagtaccgcgttaggacagcctctactggctctaccccggtctccaagtccacatttggagctatcgaccccttagacttccgggatattggaggtagaaacttggaacctttcagggccaagtggagaacgacttctaaggctaacaaccggtgcaataggtgtattaccgcatggtggacttccatccggtttatttttgggttccagagcaaaagatatcacattggcacatccacaatctggatcttaactgctccattagggttattgagatagcttgagatagaagatgcccctctgtatccgtaatccgtacaaaatccaattcggacataaagaacgaaaaaagaaaaaagaaaacatgacaagaaaagaaatctgccaagtcataaaagggaaaagatcaccacgatcaaccgacggttgaaacgttcgatcacttttttttagcgattagaacccctttctcgtctgaactatatcgtactctgacatgtctacgatgtatattgtatagagttgtagaacactacgccttacagcttccaaatccaagtatctcaatctcaggaacctaagaagtatatgcggcattccgagtggcccgactctcctatgtcccaccgcgccggggaattagtcccggcacaatatgcacgctcttgaccacatcaggcaaagatggacacgtccaattctggtcaaccaagacctgtcaattcaagatttcaagattcaaggctattcacggcgtggcgggcaatctgtcagccaccaactcaaatatggtctaatctttgtgaggtattacaagaactatatattggccgtgaatggatttagttcatggataggatatggaagcatgttatatgtgttgggacagacccaacacaaaaacaagggatagcatctaggcccttccagtcttgttgcctacactagcaagacgccaccccgtcttgaaatgttactggaatatgaagttatgcagttcatggagaatctccacttttacagccaagacaaataagaataatctattaaagatagattaatattaattaatatcgagaacatgctcaaaacgagttgacctgcagtctgcagagtggagaaagaactatctgtgaaagcgcatacggagtaaattaaccctaagtacggagtatattatagtccctcgtacttgcattctaatactcgcgccaggacattcaacatgacagcgaaacaggggctgtcaatggctcgaggaataacctagccattgaacttctcttccatgctccacacattactccgtaagtagtgtagtgatctgcaggagcccaatatgtctcaccccacgcggacaagccccacgagcgccacaaacagcctctgagcaggaaggatgaccttcccctgcgcgttggaaattgcgctcagtctgatttccaagaggccggcgagatcagatgcagcattgcaagctgcagtccagctgcagctgtccggcctatgttgcactgtcacgatcagtccatgcaggagcctatcttcgctacgaatatcgcagtgaaaatggccgagctcaaatatccaaagtacgtgttgtcatccctgagtcaatagcccccctgatcctccatgcaataatcctagttttgccaacgcaactcttaataatatcggacatacgagtggtaaagacaacatccggtctagaacaaagaaaatgattccaaaatgtaaagttccccattcggtaaggttcaactagtccgacgcctttcttcttagttgtgttagtctttcgctcggaatgattggccgagaataatatcagaactatattccatagatacgacgagctatctattggctttttttactaaagttcagtctggttgtgatagttagttattgaaatcgcagaatgtgtaaaaccgccaaactaaagacttcgatctctcatatgttgcaccgataattccccaccccctcggagagtgtcggatgttttagttaccttacgatcaaccgaaagaaaaccccagcctagtgctcagtcccgcggtccagcaagatcaacctccttgaaacagttgctatttttgttttcgacgatcgcacggctaaccgatgatccaccagttgacagcaagatctcatgaaacacctcaaagttcaaagctataaacaatttcatgccttcatgcagcatcatgcagcattatccgaaattttgccgtgggtgggttgcgctgagccgaatgcaagacatcgtgaagccgatggcccccaattcccagcttgaaacaacgcccgatctggaaagtaggcacgcttttggaaaagaagtgcattggggaataaatctctcatactaatgactcggttgcaagttccccactgtctaggacacattgctggcagggtagatgactccaactatcactaatggcaacgtcctcgcgtaggactcggaaggattgctcggttgtgctgagatggaagaagcaggaaccgatctgttcctgcagttccggcccggtcttttcatgtgattgctgtatttatattccgatgcaatattactgccgaattggaaataatgtcaaatggttgacggaatgcaccgatgaagacaagacgcaacgttgcataccatgtcggtattacggtatacactacgaagactggttgttggaaatttggtgtctttttagagaatgttcccttccaatgttgtcgaaaaatttgttgatatatatttcgaggtgacactaaccttgtgaaaaagattatattatttaaatccaaaatcccaccattgtcttctatcattgcatggcaaaggaaagagtagcatcctaatcaagaaactcaagccgagttctcgatctgacctagcctacttcggatccaagtagcaaacggtccgaagaaatgtgtaccactattacccggccgttcacaaatcgccagaagagcccggtatcgttccaacgcagatgttgaagtggcacaaataaccttcgccagatcaaccggacagagataaggcggctgccttgcgtcttcgcagatagacgcagtgccttgcattgagcacgcgtagtacacgcaatggccaataccgaagcagtgacccagttcatggctcgctgtccgacaaacgcgacctaaccagagtgcggaaagtaatgaaggcgatgaatctatctctgggagggagcggtagaatgatactgcatccttcacaggtccggtaagctccgaaaacgaatttttttgtgatcctcggctattgaccggaggtcttttctgtctcttggcagttggttctgccgaagcacatgcagacatagatttctcacaatgagatgcaggccatgcatggagacgctcgacatcttgaatagaatctagtatcggattatatcttgcactggataccacggcaacgcgacttcccccgtacgcgcggccacatacgaactcgtcatcatcgtcctcgtagagatcgaaatccacaattatcaagagggcatatgcatcttttggtaaaatgctgatggcaacatcgagaagatcgtctagattgacttggcccctatataccccatttgacaaggtacgtgagcgaacccgcacgcactcatcgccggattttagacccaggtattgcaggcctgttttcttctgaggtttcttcttaggggttttccatggaataaacttcaaggtagatggtggcatcatcttgacaggaagaccgtgatagaacgcagtcagatagtcctggacatccttcgtactagggggttttatggactcatgatctggacattttggtgtttcccatgttcccacgaagtcaacatctgcatcaatttgaggagatggaacgacatagatcgttttttgcttttcggttaccggattgcggtcttcctcatcaagccattcttgaaagctctgcgggtcttctggatctccggcaagatcatctccaggcagcaacaaaggggcaggaaaggctctgtcgtcttcttcaagtaagagtttgtcttctcgtgggaagctttgatggtctgctttgatcgcagcgaggcgttgccgttggccttgtcgtctgaaacctgctacagcagcatgcggagaggaggacaaacagacacacgtgtgatcacactttgaaattgatctttgtggcatactggaaatttcaactcaagtgtgaagaatggaagaacttggaaggggacggcatgcgattgcgcacgagcccttcccggagtagtcatcaaggactcacatgagtcacatcatcttcatgtggaattatgatagagatggttgttcttgaatcacaggtcaaaggttactcaaccctgtttgcaggccttgaataaagcgctgaactatccggcgatcagtatcccagttctgagagcagttgcttgtgtgtctcatagctcaacttcaaacataagtgcaatgccaattccactacccaggacaatacctatgagtggctggaggccgatatatcttgcgacactgaaaggaatcacccgcagatcatcattcgtggattgaatcattggagtaaagtaccatgtcgaggtgatcccaagccataacatgacccataccattccaacggctctcttccaaagcgggacaatacctgatgattgctttacctcttgccagttctctggtgcttgtacccgttgccaaatattttgcacgccatcctcgagcattatcccaaagacaaacgataagtagaatggcattgagccggatctttccatcggaacgctctgcagtatatcaaccatgacatggaacattgcggagataagaaagacaatgaaaatgttggtgtatcgctccagcattgaagatcgggtaagatgcaaaaaatctcgcgcgatgaagttactgatagaagtgaagggctgacgcatgaattgatgccagaatttcctgtgaaatacgttaacataatcatgccatcctagtaaataaatatggcttacccccaaaagttgcgcaatgtaaatgcatcggccatactcccaaaggctggtggccagtctgcaggggaatctagcccgattccaacgaaaaatatcgacagtactcgatatgcaagatcaccgattagacggtttactataaaccaaatagacagatgcgtggctattcgctctgcccattgtccgaccggcacaatccatttgacctccaaggatgcgggctcatacagaccacgttccctagcctgctgaatcgagaccgtttgcacgatgtctagcactaggcactgccatgcgacgattgctagctgtcgcagcaaaaatcgaccccatgttgggacctgcataccccgccgcagataatactttggatgagagggcacattcttcacctgccagtgtgtattgacggcacgggtttgagtaagtaagcgagatgctgcgagcaacttagacccggactttcgagtgctctttgcgtcgcgcgagatgtctgaattgactagaggattaagcaacaacaggtttgttgcctgtaaagttgcaatgacaaattgtgttatggcctggcaccatgttggactgccggacgagccaaaaggacggataaaacggctggcgatccatatcatccctggaatgcataggtagcgtaaaagagagcctttccgtgtggtgatgatgagcgcagcaggaaccacattctgaactaggtaggaacagaagaattctaatatgtttgcacctgttgagtgatatagcccgtacatcactgtctggtgtgagaggtgaatgaggtctcggtttaggctcacgattcgagccggacccacaatttatggaccagtcggttagatccgaatggattcctccaggggaagttctaaagggataaggagttggcttaccagatccaaaatttaaagccaacaggagaactttggaagctcagtgctgtattattcatacagcctagacttcacactgcaaaagtgtgctccgatgaataatctgccggcaattctattggttacctagttgtatacctatatcaagaaggcggtaaaggtctatatgcctacctagttaggacccggctgcctacaaacatctggttggtttatcagcgcctgcgcatctgtggaactttctctctacactcatctggacaacatgccttggtgtgcacaggtgtgtcagttctgtcagaagcgatatgccaacaaaaccgcgcttcgaaatcatttaaacaattacactggcacctagcgttttccggctgacggaatccatgacatcttggaaatcaatcaaactctttagcgccttcactcacactacgaggcaggtgacgatcacaaatacaaatgctggacatgttccaagataatcatatctcgctgccggttcattgagcatgttttttattggcgccactgtggatatcaacctggatcttcagaaacgaaaaatggccctcaacatctccattcatggtatcttccctttgatgaagagacggttcttcttcgcgaagagccatttccgttcctcgatcttcccctaggtacgttcacctgtttatcttttaccgctctgtccccttattcattcggcaagtaaccggttgtctcactgcgagcatgcatgttttcaaagaatttttttgactaactcgagcacattgattgactagagttgcgattgataatctacaaatttctcctctctttcgacgaaatatacattgaaaaacgtgtccgcgacagagatgttgacccccacagaagtgggacctggatgcaacataaccccatcaacaatccactggcaattatgtctgtaagtagtcaaatttatgatgaagcacgccggacgttttatagtctaaacacgttcacatttggatcgttctatggtctacctgtattcctgattggaatcggagctgaaaacgccatgctattgcggtcagtgcgctgcaagagcaaaacagatgaatacaaagactatgcggatgacattcgatcatgtctaacaaaggcagccgtggcgggacaaacgccaagccaagaactgcgaatccatcatttcgaagatctgtatttgaatcttgtaacccgaggacaacccccagttgatgtacctacttactggtccaatgattgtcgtctggtgcgacccgatattgcagacgcctgcgccttcccaggtcgaaagcgtttttccctcaacgtcattcttaggaaatatgaagtagacggacgaaatgccgatcgaaggtctacggtttcgtttgaactatatatacagaataagcgagcatgtgcttaggtattcagctgcagcggcgctgtgctttggttcctcctcatcataatgactggaagcatgggatgtgttctgtaattcagacaagcaaaagttactgatagagaatgaatgtagaatgttcatgacgtctttgagccatctttagcacgcatagcatagtattggccctggggatgatttgcgcgttgaagaataactatattgagtcttaattctgggctttacttgactagtcctatttgaatttgagattactgttggcaccactgtgaacatggaggtagtcactagcaatgtctcagaactagtcttgggaggccaaaaataccgtgaaatactgaaaaatacagacaggcgtaaaatattcagccaatgagataacagctcaggtaaggggaccctgaaaagtggaccagcatgtgattggctaatgaaagtacagtactttcagctcttcgctcttattttcctttccaaatgtcaaacatctcgagattcaatgatgcaaacagataggcctcatgtcgtgttggaatacgattgtttagatgatccccagatccccgaggatcagccgcttctcgggtccccattcacccactccgaaacccactctcaacatggattgaccatcataacttgcactgcctcggtattgtttattgccagtgcaataaacaacctcgtcgccctcaatatcacacaacactcatccgagttcggattagaccccggagttgaattatggtgagagacatctcaatgccccggcagttttctatctggttacacagaacatgccaagctcacaaccccacaggccaatgtcaatgcactatcttgctcaaggttgcacattcctgctggcaggatctttagcagacgttctaggcagtaggagaacattcctgtgcggatgctttttacagactgtttgccatatggctagcgggcttgctcgaactggcatgcagtttattactgtcagatttgtgtccggcgtggcttacccgatgtgtttcgtttctgcaatgagcattcacagggagaatcttccagttggtaagatgcgcaatttggcattctcctgtaccagtgcaagtcaatatattggctccggggtaggcatcgtccttagtggaatactctcagagactgttggttggcgatggggctttcattgcgctgcaattttgagcctatttgggtttctcctatcattttgcaggattccccaacaggccgaagagccaaaatacgtcccatgggcagacttggctgaaggtatcgattggtctggaactctgctggctagttcattgatggtacttctattctctgcattggcgtacgtattccctctcagtgatagtctatgcttacagaacgctaattaataactagcgtcatcacaaacaatgtgcaaaacattggcagatcgggcctcttcattcctcttgctcttggttggattcttgtggttgccttcctgttctggcaggattgctgggaaagagacagcacacaacacattcagaattctctttggacaaattgccattttctttccattggtttggttattttcttcgtctacgcgtcttctctctctacttcgcagcttatgatcttcgtattccaacgagtacaagggctctcggttcgacaatcttctttccaatatctggcaattccaatcgccgccgcgctgagcagtctggtcactggacgtttcttgactcgtgttacagccaaccagatactcgtcattgcaatatcactttctagtttctctccactcttgatggctacattgagcacagcttggccttgctggaaatatgcaatgcctgccctatcattaaacccggtggcaccaaattccgttatcccaattgccacaatgctggtcgctgggtcttttccctcagagactcaggagtttgcaatgggggtgctctgtactgtggcaatgatcggagcctccgtaggcatggcactgacggcgcttatctcaaacgatgtcagcacacagcagctccagaaacccgaccagagtacttctttagaatccccagagatatggatgagcggttatcggactgcattcttgttcttgctctctctaaacttggtcggcttggccgtcacttttggctgcttgcgaaaacttggattcttaggtcggaaattggatatagaccattaattcgttcatttcttcttacttatctgaggtccatgttcccattagtactacaggaataagtattctcgttaaggatgcctaatggtacgcaagctacttgtctaaattgtctaaacctaagccatttatgagacaatcgactactaccttccctattgaaccaacatgaaagaacttaggccattagtacccctttttgtcccttaaatcatccttgagtaaccatacatcggctagtattcatagaatgcgacaatgcaatcttataatagtgggaggcatgttcctataaaataaaatccatggccaccaacaaacttttcgatttcgacccgggcaaaaaagaagaacaccatgtcaccaccaaaacagagcatcctcttcctcacaagccccgagcatggacagtccaacgtagcactcgcagtagccgaagagttcctgcaccgcggcgagttcgaagtccacatcgcctccttcgaagaattatcagcacgcgtgcaagcgataaacgacaaagtggagtacgaccaagtcatccacttccatccaatcgcaggtccgtccctgtccgagatcgtgacccgtacaacaccgaatatatgtcatcggccggggcttgctggaacgcgtgatgcgtgtaacatcatcaacatctccgtggtaggctggaagcctgatgagtatatacggtcatatcgaagcagtctcgagattctgaaagatgtccgtccggtcgtcgtggttgtggatccgctgttgcatctaggactagatgccgctcgcagtatcgacacgcgaatcgtgatcctttggcctgtgcctttgaaagatatagtggtaactatccagccgaaagctggtcttttgtggaaatatcccctgtgcgcaactcatatcttcctcttagaattcgggtatcgagctgactttctgctcctcagcaccgggtcgggatatccataccctctaccatggagattgatccttgcgaatatatacatggcgttttgcttcgggcttatggttcgcttgggtaagcccctacgcgatcttctggacattcgaaagaaagcaggaattcagactgtctttccccacgtggcaccttactgtgaaaaccatctacatctctcgccttcattccaagagatggatttcccgctatacgtcccggataatgtcatcagctgcggtccaatcctccggccatgtccgtcacttacagatagcgatccagcactggattcatggttgaaagagccgacaattctgatatgtctcgggtcacatgttcaagctccggaaaatgatgcactgcagatgacgatggctacccaggcggttttgcgcgaatttcctagtatgcaggtcttgtggaagctcaaatatgactgggaaagctctccgacggtcaagaatattctcggatctcttgtcagttctgataaggtgaggattttcccatggatccagccggagattatatctcttttggagggaggtaatatacttgcatatgtccaccatggaggagcgaactcatttttcgaggcgtgcaagtaggttatacttggggtcacacatattgaaagaaaagtgctgatgtctcttcccagggctggtgttccgcaggtcattctgccccagtggttcgacacatacgattgtccggcccgagtagagtggctaggtattggcttacacggaagccgcaatgtggcaccgggtatagacggatcgaagctgtcttcggccctgctgcgagtgttgaaagataaaggaatccagaggcgggctatagccattggagatttgtgcaagacggccgaaggacgcgtagttgctcatgatcagatcgtacagtacgcacagaaagagttgtgagcgacgtaggtgcaataaattcattgagtcattcacagttccccttccgagggctcggggcatgtatgcattatgagaatgtcattggtaaagacaagtcatcggcaattcagagagataatagccgaccgaaatccatgcaatcggtcatataaatcatgaaagaaaaaacagcaactgcgatcctcaacgcccgcgcccatatccaacaaaaataatcctagtaactgtgactagatagtcgacagctccgtcagaactcgccggacatcttgccgagcttgcctcagcccctcatcaacagttccattggcatgtcttgccttcacctcatagtgtagctcaaccagctcctttgcacgacgaagatcggccttgtcgtctgccgggctctgatctgccaatgcgctaccggacttggttgaacccgaggctgtgccatttttgtgcacatctaccagtgccagggcctcgttatgaccctgtgccgggttgttagcattgtcattgtctggtggagtactgtcccttgtttaagacgtggcttggacgcgtttgggcagccgtgaagaaggaagcaatatacttacgcagacgcggagagaattgatatctgagaggatctctgcgacttgcattttgatgtgtctagtgatgtttgagccgagagagatatttggtgtccttggaaatcagagccgaagagtgcaatgtcttggcatacccgcacttattcgaagtccgtttttcacctgggaggagattaatatcggcactcggggctcgctggatttatatatattattaatttcgtctgtctcaaagcttggcgctggatttattatcggtaggagaaataccgactctttggactccccaaatgatgacttcttatatacttctagtctctataagttaatctaagtctccttgaactcatacggtccctcgcggtccttaacctcaacctcaatccgtccctcctcgatctccttcccgtcaacctcaatcgacgccttcataacatcacccgccttgacctgtccaacacccttgggcgtaccggtaagaacaatatcacccttctccagagtcatcacgcgcgagatatgcgccaactgctgaggaatgcggtgcagcatcaggctagtcgagtcagcttggcgctcggcgttgttaacgctcagacgcaggaatgcgctgtgcgggttagggatgcgcgatttggggatctcctgcgagatagggcagaaggtatcgaagcccttggcaatggaccagggaaggcccttcttctttgcctcatcttggacgttgcgggctgtcatgtcaatagcgaggacgtagcctgtttagcgcaatggtttgattagcgacttgctgcttgagccggtccaccggtccaccgctggggtggacactgcggtatgcccgttcggacccggattgaatgctgtactcactctgaatcgcatccaatgcgccctgctcatcgttgggatcgagatcgcgcacggtcttaccgatcacaagaccgagttcgacctcatagtgtaggctgacgcccttggggcggagaacgggacccgcgccgggaacgaggatggatgatgcgggcttcaggaagaagaatggctgcttgggtgcggtgttattgagctcggcaatgtgatcgctatcaatccatgctgttagcaattgtggccgagagaagagaaagcgacgccggtgtcggaactcccgagggaacagggcgcgcggagacagggaaactcacgcatagttacggccgatgcacataaccttgcggcagttggcgcggacggaagccattttggagggaattggggttatgcgattgacgaagaagaggatttaaggaaagatatgtcgtgggagggccggaggttcgggtgttctccgaaagatgcggagaactcccacggcgccgaccgcttgtatctttatccactctctagagaaacgctgaacgaggaaaaaagattggaagatacgcatctacatatctgacactagagaactcaatgatagtcttttacggcactattcattcaattgcagctggttatccgagaattgacatatcacacaaccacgaggtcggctccctcgtccgagaatcggaatatgatccgagcatcttaatatccgtaggaagacaaatatattgatagagcaagagtcagtcaagacactggaactgctcgaaaaacctaggaataaacgtatcacacgataatagaggcctaccggctgttgaatgggctcgaattacgcttgtatgccactggcaagagtagaataatacaagctgtttatacactagttattgatacagtaagaagttaaggcttacaccaggatatctattcaataagagaatacgaagttaaatatcattcaaggacaacgccttgaggaacatgtcacattttggcccgttctattgatcaagtacgagaagaggaagcatccttaaccaacgagagcgagctagatacagacaaggaaaagcagagggaaatgcataagaaataagggaaaacggagaagcaagaggtgaacgcaaacgtgtctcatctccgttagtgcaagacataggaaccatagcaaaggccgagaaaaatgccggggcgtcgacttgtcaactcaatatgcggaagcatagccccagtcacttgcccggcacactgcaggcggaaacgcagaaagccacttttaacgcagattctgcgatcataaaccgcatcaagacgtcaagagttagggggtttagatgaggtcagccacgttcatgggcatctcctcaacctgggtggagtagaactgctcgatctcacggagcatgcggacatcgtcagcggtgacgaagttaatggcaacacccttacgaccgaaacgaccaccacgaccgatacggtgaatgtagttctcacggttggcggggagatcgtagttgatgaccagggaaacctgctggacatcgataccacgggccaacagatcggtggcgatcaggacacgggaggaaccggaacggaactccttcatgataacatcacgctggccctgctccatgtcaccgtgcatagcggagacggtgaaatcgcgggcagtgagtttgtcggtgagccagtcgacctttcggcgggtgttgcagaagatgacagcttgggtaatagtgacggtctcgtagagatcggagagggtgtcgagcttccactcctccttctcaacagcgatgtagaactgcttaataccctcaagggtaagttcctgcttcttgacaaggatacggacggggtcacgcatgaacttggtggtgacctcaaggacatcctggggcatggtagcggagagcagggtgacctgggtagactgaggaagcagctggaagatgtcgtaaatctgctcggtgaaaccacgctgaaaaaaagagttagaaccgattgatacatagagtatcaacaatagcaacttaccgacagcatctcatcggcctcgtcgaggatgaagagcttcatggcggtggtggacaggacacggcgctggatcatgtcgtggacacggccgggagtaccgacaacgacctggggaccggcgcggagagcgttcatatcctcacggacgttggtaccaccgatacaggcgtggcagtcaagggacatgaagtcaccgatggcgacaacgaccttctggatctgctgagccaactcacgggtgggagcgaggatcagagcctggcaggccttgatctcggggtcgatcttctgcaaagcggaaatggagaaggtagcggtcttaccggtaccggactgagcctgggcgataacatcgttgcctgacctcacaggttaggcgcaaatttcaaaaatgaatctggaataaaagaaactcacccttgatgatgggcatgatagcacgctgctggatggcggaagggcgctcgaaaccgtaggcgtagacacctgatatcccgtcagtatttttttttcaccccacctgataagacgaaaagggacttaccgcgaagcagctcgggcttcaggtccatagcatcgaaggaatcagtgacctcatcgtagttagactcgatctgccctattgatgaaaattgcaagattagcctccatcttcatcacgcatttcagtatccgacgccacccaatactgaatgcgatcgcgcgtgcgacagcgacagcaagcagcggggtctctaatcagaaagtaacagagacttagcacataccctcggcaagatcctcaagacccttgtcagccatgattgcggtttgatagaaaggatcacaggcgttgactgtgatcggtgtggtggggtagttttagcgaacttgtgtagattcgcgtgggaaagttgacttctagtacctcagactcttgataaagagtctttttacaggatactagggaatattgaaaaatgtggttggatgtgaaaattcacaaatggggtgggaggaggaagagaagaaaagcgaaaaaatcgaatggccacaaccgccgcgccatttgctacgccgtttttttttttacggggcaaaatctcaccgcttgccgtgttgggggtggccaagcccaagcgagtttagagtgggcgacatgggcatgaaaacatcttcttagtgatgatattgcattttttgaactgattggtgtggtgcaggttgttgctttgtttagggactttgattctgtccattcagtttcttatgttcccatttatttggtgaactatcttccagttgccatcaaacgcgtctttgaagccctaaagtgccagccagatcatgcctgatatcacctccttgtcgagtcatccaccaccacacgatgcagagatcataacggaggctatcccctcccacccattaggcgtgaagccaagtggaaatgctctgttggctacatggagtcttcgcaatgccatagggacctttcagcacctaccagacgaactaatcctgttgttgttggagactctcgatgggccaagcctattgagcatcgggcggacatgcaaggctttctatgcatttacccgggctgaagaactatggaaagcgctgtttgttcggtaagctacctgcatatccagttgaaccatgtagatcttagagccctacatttattcaatatcataatgtcccaaacttccaatgaacacatgagatactaagtctgcttgcagtgacccaagagaagatttcacctggcgagggacatggcgatcaacatatctcaatatccccgcctccaaggtgcccatggtggactgctcccagttattctccgactctctataccgaccgttcaactgcgcacatatctcactcgacccatatgtctccaagattccggcgcggaaccagatcgcacgacttccagacctgtcacctgaggaattccaagcaaagtggaccgaccgaccattcatcttgactgagcctgtcaaggcctggccagcatacaagaactggaccgtcgggtcattactcgcccgatatgggaagaccaagttccgcgccgaagccgtggactgggccatgcgtacttacggcgactacatggcagataactccgacgagagcccgctgtacctatttgatcggtccttcgtctctaagatgggactgtcggtcgggtctccagaaaccacacccgacgcatcgtactggccaccagcgtgcttcgctgaagacttcttctccgtgctcggtgacgaccgccctgatcatcaatggttgattatcggccccgagcggtccggcagcaagtttcataaagaccccaatgccaccagcgcttggaacgccgtgatacgcggtcccaagtattggattatgttcccgtccagcacgaaacagcctccgcctccgggtgtctttgtgtcggatgaccagagcgaggtgacttctccgctgagcattgccgaatggctactgggattccatgccgaggcacgccggactcagggctgcgtggaaggtatctgcggcgcgggtgagatcctacacgttccgtctggatggtggcatttggtcgtgaacctagagccatcgatcgctattacgcagaactttgttccccgaggccatctcggcgctgctttagatttcttgtctaacaagccggaccaggtgtctggattccggaagaatgtggttaatccgtgtgagcggtttatggccggtatgcgcgaggcatatcccgacctgctggagcacacttgggatgagttgcagaagaagaacgaaggcaagaagcgcaaatgggaggatattgttcacggaaaaacagaagacacccaagacaccgaaggaggtggatttagttttggatttggcgatgatgggagtgatgttgaagtcccatgaactattactgcaatatggagagtgattgaaccgcaacccaatgaagtcgccaccacaaaccagcaccattctccgccggaaagggcttccaaacccatcaattccaatccaaaaccagttcaaaatttgccatatggtcattgttctctacactgcctctgagtctgcatattcgtcaatgccccgggcatcctttaatgacacgcgattgtctttgccgctggcgttccttcggagaaagtcaagtacccaacgaatgcgcccactgcaaccgcaatcataaccggcccattatacgtcatgaagagcaacctaaaccaaatcagcaagccaggacggggccaaatggtttccgggaggcactcacatgatgaagaagctatagaacacttggatggcatacaaagccgccatgataagcttgcccttgcgcgccaatgccgctctgttctcgcttcctacaagcagtggtgagctttcgtggtgagtgtggttggttgcatccgccaggccgttggcaatgatagggtcggcgatctcagcgtctgcagagagccaagacatcaataagaagcgtgctcattcagagtataccatctccctatcatgtccccgatatccaacgaaaacatagtaggaattattgggaatagagtatccttgacactgtccatggaaagagcaaatcacttacccccagtagtggcagaagttcccaggaacgcacttagccgctgtgcatgggcagcctcgtatttacgagttgctgatcgtattccctcgtagcccgcagcaaggataacgatagcgatgagggacaagaggaaggagaagggaccggtgatacgccagctgcggaagacaatgcacaaattctcggaggaccagttaaatagcatctacatacggaattagcataaggtaaactacgaccaaagctgaatcgaggctataactcacattcatactgcatttcccgcccatgtccatatcgccgtggcccatatcgccatgacccatatcaccatggcccatgtccgagtggtccatcttcaatagtagtgagtagatatgcaatagtaacaagagacctcttatgtctcaaataagataaacgacaatatactcgtacgatggcaggtggtacgaggagcgaacaaagcacatcatcggacgattaagaggaggggaatgcaaacaagacaaacatcgataagctctccaagcggatataactctccagaacccaaacgcggtcattgactacgcactgacactacatccaccccaatctcaactttgtttcacccattctgcgcatgggatacgtcactttagcataaaatattcttcccattgcgatccacttccacaataatggccgacacagcaccggctccaacagccgcgaccgcgaccaccggagttgcagcgcccacagccggcgcaacagcaggagcaccgaatgcgcccgcagatcagaatgccgcgagtcgcgggctaccttactacgagaaactgcgccgcgagctgcgggacacgctgcagaaaaagcgcttaatggataagagcatggtgagttgcagccttgcgcgttcccgtctccagggaccgggacgtggttacctctctggaattttgttatttcgctgcgcgagcatgttttccaattgagaatctgcaatatcgccctataaatgtgtaaaccgttctgctctgatgtgtttctaacacacctttcccccaggcccaactcgaagaccaaatcttccgcttcgaacagtcatacctggaagaaacgaccgctggaaacatcatcaagggctttgacaactatatcaaaggctctgcgaatgggtcgagtctcggcgccgcgggactgggtctgggcagcagtatgggcgggtcgaggcgaaaggcgcaggtgacggaatcggatcgagttttctcgcgcagctcggcgagttacatgatggtatgctgaaccgacccgaaatggaactaccatatggtgtttctgatttgaactgaggactaacgattattgttgtgtctgcaggattccccaggtccctcctctgtacaaaccacgccttcccacgcagcaacgccgacatctacgactggaaacggcatgtccatgaagattgacccgctaaccgtttctgccgggatgaggaactcgaacggcgcatcaaaaaacaaaaagaaggcgactggtgggtcgaagaatatgaagggcaagaaccagaccgaggatatttccgacgaggacaagccttctgtgaagcggttgaagatcagctacggcagagactgagttttcttgcgagattcagtcttctttatgttctgcgcccgtcttgcatctatctgcttggctttttcttgagttcggagttggttggtttgtcttttcacatgactcctgggaggagtcgtgtttcgggcgtagcgggaaatgggaatgggatttatccgtcttattacacctacgatgcgatatcatgtaaatcacgaagttatacagactacagcgtttgtcggatacatcatttgtttcattgcttcaaattgaatgcgacacgagctaggtacatgcgatgagtgccttgcgatactctttgggcttggctaaagcctgccaatcaaatacgtttcttacaatcacagctgcagtcggtatgtagcgacctcaaacgccctcaactcaatcttgatcgcggaaagaccgcctgcagattcaatatcaagcccgtggttctcatcatcctcgagaatattgcacttgaaaacattcttcacgggcagtgaggtctcaatggtaccgcgagccttaccaccaagcgattcatagacacgcagaataacactctttccaggacgggtaggaacaccatcccaggaaacgtcaacatcatcctcgccgcgcttgacaacatctagaatcaaggatggcgcgcccttgatagatagagatttaaacaaagcattggaagcagatgctttagggccggctttctcaacaatgagtgggttattgaaattgaagcctgcgcggattgttcgggcatcaagggcaccggcgtggggaagaattgcgtagcgaatgtggtggcgacccatgtcggcgtgggcatctggcgccttgggggcacggagaagcgataagcgcatcaggttaccgcatgttgcgaagccgtatttagagtcgtttaggatggagactccgtagccgttttcggagaggtcggcccatttgtgacagcagacttcgaatttggccatatcccaactgcatattacttagtatcgttgtgaaggagatgggaagtcggtgcataccttgtgttataatgcgtcgggcgcctaacgatgccatactgggtctcgtaggatgcttcggtgttgacgatatcaactgggaactcaaccttcaggaacttcatcgtctcttgccattccacctcgctctccatttccacgtatgagggctcatcggatgtggatgccgacaggctgatcgtggtcttgatccagctcttctcgctgatctgtgtctcagtcatgacactcactcggtgtgggtcattttctacaatggtcgtcttacccccgggcaactcctttcgtgactcaatatggaacacctcgacatcccatgcttgccagtaaagaggcttgtcgtcgaagataacaagttggccagccttgcggtcctttgcgacgatttctctatcggcttgcacatcgtacaaggatgtgataaccccgtcatggacatcaaccctaagtttaccgttctccaggcggaagacaccagatttgatctcagtaacggtcaccgaagtggttgttttgaagtcagcccgctgaacttgcatcactccagttgtaccagcagccacagcatatctggatccattgtatgcggacactgctggaggaattgcgaccacttctgatcgggcccatggcaaggtattgagggccatgaaatttccacccgtgacatcgctagtgagtcccaaagccttgagggcattctttcgcagcttagctccaatctcaaagatttcggcatacaacttgtctgagtcatcatagcacatttcgatggagctacccggcaagcaatcatggaattggcaaaggagggttccttcccacatctcatcaatctcctttttgggataccgatatccatcattagaagccttgatggtagcgaatgtcgcgagaagctcaatctcacgcagcaaaaactcggccttgcggttattgcgcttattgttcgcttgagtggtgtatgttccacggtgcaactcaaagtaaagctcgccgtaccaggtagcaaaatcagtgccagaggcagcctttgtctccaactttgcaaagaaatcatctaccgactcgcccattttcactcggggcaatgagccgacctgatcactgagaccgcggcatcgacgcagcttttcgaggtgcccaaaagtcggaccaccacctccgtcgccttttccgaatacaagcagcgatgacttgtccgtgtctagagacttatgctgagtgacactgcgtttgacatcaccgaaatgcgcttcagctgtgtaggtctcagcaggagccatgtggcacaagacttgactaccatcaagcgcaacccactggaatgtagtgtgagggaagttattgatgttgttccagctgagcttctgggtgaagaaacggctcatcccagccaggcggcatatctgagggatctgtgtagagtacccgaacgtatctggcaaccagaaagttgtgcatcgcttaccgaagtttgcctcgaagaatcgctgtccatacaagaactgtctgaccagcgactctccacttggcatatttgtatcgtgctcgacccagctcccaccgatgggctggaagttgcccttccttacccagcgcttcacacgatcaaaaacggatgggtagtactgcttgagccatttgaattgttgagcctgagaacaagcaaaacggtgctcaggatatcgttccatcagatcacattggttagaccatgaccgtgctacctttcgcttggtctcagcccaaggccacagccagcaagtatcaatatgacaatggccaatggcataaactatcggctgcgtgtctgtgtcgtaaacatcggatgagtctactttgtcgccaaggtactttctagcaaccttccgcccctcgttgatagaatcattgcttccgttgcccgcaatgaaagtatcgatgatagaattggccacaacattggcttcatgcgactcccatgaatcccctgggaattcccgggcggcgtcaccaataatccagaaatcatagaaaagcgcccgggcagccaggtttaccgcggtgattcgcgcagtgctgagcgtgaactgtttatcgggatttggtggctggatcgaatcgccaccaggagcattgccgaacatgccattgcaagccatttcaatgtagaaggtatgctctttcccatcgcaccattgttttgggagaacaaactcggtccgttctccgcctccagtcaagccctgcagcgggtgtccgtcctctgtccagatcaggccttcgttgttggcatcccagtggaactctagatgctcccgttggagcatgtcctcgggcactgtgaggtgaatccggaaccaatgtgtggaccaactggggccaaaggaggcgcctatgcgagtgggcttgaattcctgagaggtcgcctctttgaaggtcggtcgctgcaggtccggaaccgagtaaacagagagcttgacatgatcttcgtccgagtttgtggcttcgtggtactttgagacaaggttttggccttcgtactggccgttcgacgtgaactgattcaatctatcggtatagatcttcttgatacgttggccgaccggacgttcagctaactggggtaaagctggaggagcggggcgagagggaacttccccacccatgatgacggattttgattgttataaagaagaaaaagaagtacgtatgctgtaatatgattgaacgaagacctaagttgtttataacagagagggtgagaggtgaaggaaggagattccctcgagttcccaaatgcggagacatgacggcatgcggagacggcgatccacggatgttacggtataccctcaacttttgtacctggatatagtcatggatatattaaagagtatttgatcattattcagatcatttcaacatctattacccaatatacttagcgtacttcgtaaactccccatctacctttaaccgttcccaatcttcgtctctcagacagataccaacaggcatctcaccaccggccgatcgaggcatcaagtatcccaagccctcaaagggggtaaaatgtggtcttcgcacagcttcaggcttacccaatcctagattgaagtcgagatcgtaacagctaattctcgaccacgaactaagcataacatccgaggaaacattgaccgtggaagtaagagaggccttggtcttgtcaaccgagcgactgagaactgtagcgagggcacgggtattgaaaataagatcatttttcttagaatcgagctgggaacgaagctcggcggcaacgatgcctagaggcttttcgaggagtttttggacagtatcggtgttgtatgttaaattctgcaggagacctggatagtcctggggaataccaaagcgctgtctcatgtcgacagcacgcgtaagcatcgattcagaagtcgcttccagacgagaagcccgggcgcgggcaatggatttccagataaaagcgttaacagcatcgtcagtagagataaagtccgtggaggcgggcaatgtattggtagcgagagccttgagggagccaagctgggccgcagagaattcaatataggcccatgtagattttggaggtgtaataggattcgagacgacagtttcgacgcttggcgggggtttcacaatctggcgagcaagctcagggcccggggtgtacgaatcatccagtaatggaatgacatgactccgatccatgttaccgactgcaagctcctcgcttgtgaacggctcatggtggcaagccttggacagcaatccgatgatagagtcttggccagtcatgtccatgacattatgctgagcgaccagcgtgagcatcaaaccgccctcgattaaattcgcctggacacagaagaccaatgctgactccgtcgtgatatttggcaaattgcccggtaggtccaaagttgtacaaggagcgatgactttctcgtcgagcatggtaaaagggaacttggcctggcgaagcccgtccattgtcggcgcggaggggtcatgtcttagatctttcaccacgagctggattttgtcgagaggagttattttgaagacgcccgtattaccatcccctgcgccctcgttgacaacctggccagtaagccatgggaaactttttgccaatcggtcaagtccgtttgtgagagtatcgatgatggcatcatgagaagatgcctcggggacggggtaaatgaaacatatttgtgtgtacaatttgtagaggcttggagtttggcctaatatatcgagaacgttgtccgtcattgttactagttttgtgcaacgtctcttgtttttactcttctgttcctgtcgaggggagatataaacattgccccgccaagtccccatcctttgtgagtcaacattactcactacgaatcattcagaattaatgtatttgatcagttcctaggataatatgtttaaagacatacttatgtattctctattgatctatctcaccacagaactcgcatcggggccacatataggcagacgctcgaggcatatattttccaacgccgtctccatccaatgtgcgacgagtttgaactggtcaaggtgtatttgagctcaagaagtgttcagaattatacatgccgaattctctaggacatatttctgaacccgtcaatgtcggccggttcgctgttcctgagagttcgttgatagatgatgcgtctttcgtgcccgatgccaacgttgagatacaggctgcctttgctatgagactgtgaaggttccttttataatctacagcggcaattagatgggatataatatattcagaagagatttatatatcgatatatctactgtataggttgacaccagaatgctcaaaataaatatggcaacataatctaattaagtatatattcatgcaccctcaaaataagtagacatatctacgacagtaagtcaccgattacctttagattccaccatgtgaacacacgcgcagattatcgcttccacggttatgggaagatgaagccctagaagaaccaggatcttcgtaaaaagcctcatagttgatcggttgcacaaaagggatttcgcacattttcttttgactgtccccatgctcgaaatcgaacaattctcttggaatttgggagtgggacgccgaccctgatcccgatcgctgcccaatggcattgtcagacttggaagctgatcgatctcccgagttggtgtgacccgagatggattgttcaaagaaatccgagactacaccagccatcatgcctgtctgaagctcggcgataacccgtttgagggttgggaggcatgtgcagagaatggaagagctgaggattaattgtagccagatggctggcatgagggcattccatgtttcatctagatggttggagttatatagtggtcggagggagtgtaggccggcaatggtcagggctagaactctatgtgggattagatgaggattttattgatgtttggaggttcacttacaggatccgcagcgcaaaaagggcagagatttggtggcgcttccaccgtattatctgcacttgatgtagtaaaaccactggtagtacaattattaccacgtctaataacatgtgggtccctcctagcgcgatatataaaacttcttgattcacgcatcgctcggggctggagttccacggttgtagttgcttgcactgtcttccgagcgctatgagtgctgccagagcccaggtactgatcagacctaaagcaaccctacttgcaagcgttattttctcaaagggttgcaaggataggatgaggagcgcaacagctgccttggaacatcctaagacgacaatagcgagaagttgactagcgaagaatgtcttgattatgttagagcatagcctgttagaggtttcttagccttcttaccttgctatatttttcaaacgaggcattgctcaatacatatcgatgcttgccaatgccatgcgagctggctacattcacacacacagtctgagggataaatatgatctgatgaattaattagactagacaatgattaaacgcaaagctacttacacaactgagaaatagagttgaatcgctccaggaaactctgcgcaaaacacgaatgcgagatatcaccgtcactgttgtcgcgaggatagtgataataagtaggatagtgctcacggtgataacccaagcactatgatcgttatcagtgacaggcaagagtggcagtaggagaacatttatgttggatgacatggcagtcgaaagattctgtagacataaatgaacagaatcatgttcatggcatagcagaagagacattatatgatatagaacccagccactgaccgagtaccctcatattgggttgttcattggacctcctataacaccaaagacacacaagcacgataattcaagtcttgcaactgatcagtctatctcaagttccacaaccgtgcatcttccagtcccacctccaacgccgatacccctaggcaagacaagaacaatttaccgtaagacaacgattctgtatgatccttgttcttggattcatgacctccgtgccagttttgctttttctttccccagtcttccttgggaactgtctaatgtttttgtttttcgccatcaactgccttatttactctgccgagaataaatggagcgccttgagatgctctccttggaaaggggaaatatagtcattggaaaagccgcgccagatcaagatgcaaatgtctccaatgcctatgacaccccgcgtaaaaagactggacccccggagcaggcttcgcctaaggtacgatacgatttgttaagtcaataaagtctgccagctgagacagtatacagcgtctttttaatttcacccagatattcttcttctcacttacttacttgtcgagctgggaaactcaggctttgtacggaagtcttatcccttgttgtgcttcagtactaataacaccgccacgacttaggaatctgagcacagtgctctcaaatggcggacctgaagccctagcttggggtatagtaattgtggtattcggcgcaatggctcaatcagcctcgctagccgagatggcatcgatgcaaccaattgccggggctcagtatcactggacacattacttggcaccgacaagccagaagaagttcatcacttggatgcagggtgtgtcacttatcgagtactgcctgactcaatgctaacttcatataggttgggtgacgtggtttgcgtggatctccacactcgccggtgttgccaacaccactgctacgatgattcagggcctagcaagtgtgaactaccccgagtacgaaccaaagcaatggcacataaccctcatcattattggcatgcttattgtcgaagcgttgatgaacatgtatacattttggctgattccgtggatcgagatgctggccggtattctgcacatttgccttttgatcgtgtttctggttgtattcacggctctagcacctcgtcacacgccggagtttgtctttctacacacgcaaagcgcctcgggctgggcgactttccccgcatggaatataggtctgcttactcctgtctgggggtttgttggtgcgtacacactgaatacttggagcaggtaaagactgaaagctaaccatcgcaggatttgacggcgcagtacatatgagtgaagaagtccgtcgagcaaaacaagccgttcctaggtctatcttctataccgtcgttgccaacggtatcctggcatatgcaatggttgtctgcatgctcttcacgatgggctctgtggaggaagcccagaaatcaagctttccgataatcgagatctgccggcaagcaacggggtcggtgaaagcagccactgcgatggtcagcgggctactcgtaatctcgctgtcggtaaatctggcgagtatcgcgtctgtctcgcgattgacgtgggcgtgggctcgtgatggggccctgccgcagtggtttagctatgtatgtatctcgcaccagacggtgccacggaagacgacgcagaatatataagctgacaagaacggcagatcgaccgcaagcacaacgtgccaattcgcgctgtttggctcccagtaatcgtcgtcatgatcctcgcgtgtttgaacatcgctgacggtgccgcttttggggcgttcgttgcactggggtcgattggcctcttcgtgtcatattttattgctattagttgcatggtgcataatcggtttcagaagcatgtggcaccgcttgggaactggaatatgggcatctggggacttccagttaatgtctttgctttggcgtatactgcctgggttacagtgtggctagcatttccgtcagcgttgccggttactggtgagaacatgaattatgcggcacccatttttggtatcactaccttgttcgcttttgtatattggtttatcaagggtcggactcgctgggagggattgaataaggaggttattcgactggctgtggaggggggagaacttcagttgaaatgattattctttgtcacttgctactggctttctactagatgtgtcagggtatatagtatagcagaacagctaaagattctattcatctaaaataatccaagcaattacttattcacaccaaaaaccaaatccatatcgatctccacaaatccttgatgaatctcattcaaacgcgcctcagcaactactctagcagttgcaagtacaacagtactaggggcatcatatggtccatagactggcatcgagatgcaccgcggagtgaggcgatggagaggcctaaggctgacctccgcgtgcccattcttgattcgacagatcatacttttcatcagcctttcgctggaatacttcctatatctctcgtcgaaatgcactgtcacgaagtagacgcattcatagtcgctcatctcatactcggggagacccggtcctccaaatttatacctaaacatacctggttgcatcatattgagggttttcggaatctgctggctgttgggttagttattaaattgctgaataaaatggctgattatgaacaggtacaggggcttatacttgtttatatagaagaatggagacagccatgatatcatattctttcatttcggacctctagtaagagacattgacctttcattcaaacactaaatagctttgttgaattatccgatacattccagatttactatgcattgttgctctttgtcttgctttgtatctaattaatccctaggattaagccacatgtgccaatctgataaggaatctcaattggcagatggggagttttgaaatactagcatcattagttagttactaggtttatctatccatttataattaagccagccaatgaggcattttgtaatctacgcatactctacaaaggtcaagaaaagtggaaagtccaaaattgttaattgaagtcgctggcgtcatccgtcgtaaatagaccgtgggcaggtgccagcatcacccacggtcatgttttgcagagcaagctcatgctaaggcaccgccttaaagagtgaaaaaaatgacaaaagtagatcacaaagtagatccaaaagctcatgggaatccgtgggaatcagtaaaggagaagtatatatccaaaagtatatcagaggctggaacttaagccttaacacaatactgatatccgagccacagatcagaacagttctcgtcgaggccagtgttaatgctgcggagttcctcgaaggagattccgtatgcatcggtcaattttgcgcagaagtcaccttccgtgatggtgtagtacttctggcatgacgaggtggcgtatgggtagataggggctgttgaggatgatgagctagtggctgctgctgaagatgtcgcggctggcgcggacttggttgtccaggatggggtggcggtggcggtctgcgtggcgacacgcacgttcactgtggaggcccaggtggcggcagattccacggaggtggtcgcggaggatgcggcggacgatgtctcggttggctgggcggcttcgacagaagtggatgtttgaataggctcggcagtcgaggtggtctgctcagcaacagtggaggaagaagtttgggtagtctccgcagcctctgtggtggaggagctgctcgagtcgtcgtcaccactgaggagcgactctgcgccgctagtgatggatgcaatggtagattcaacacactcgctcacatcgccggcccaacctcggacacggttggcgatatcagaggcgtagcagtgggttgcgccgcccgcgccgaggttgccggatgagtcgatggagccagagttgtaggtgcgcgcggccttgtagtacttggtcgcagtggcgccggactgagcctcaaagcactgcttgagaccatcgcccgaggcggttccagcggtgccgtcggtgatcatttgcttgatggtggaggcggggcagggagttgtcaagctgccgtccgtattgcaggtgccctcgcctgcgtggctttgcatgagaccggtgttcagaacgccgttgtcggtggactgcacgcgaacgcagcccttgctttcttgcataacaattgcaaggatgaatcgagcgtcgacgccagtctcgctggcgagtgacttaatgctagtgtttatgtcgcttgtttcgtcgtcagagttgtcgcatgatgcggcaatgagaatttggttgagagaccagctagaaaaacggttagctcgccattctgcttatatatttcaggttgatctactcacagagtgtcgtactccgaccattggctcagggaaggccatccgtcggagacatcgccgttaccacccatgacagcataggtagcagcggcgcgacggtgcaagttgtgatggggcttcgcgccatggggaatggcctgaatgagagtggaaaggctgccagcagccaggatctattgcgaaattagtcatggtcgcatggttggaggtggagctgtggaccatgccgcactcgaccactggttcgaagtatagacataccaatgaaggaaagaacattttgatagagggaatgagggaatgagggggagacgacgaaattgaagcgacaaagaaacagtaatgaactgtggaagaagccctgcttgcacgatcgaaagaaagaaaagaggaggggaatgaacttatatgtactcacgagatagatctgtgccctttaccctgccattctcattcggtagagtgatcagttgaggtccacagcggactcgaattacgttcgaatgtggctgtaaaagtggtccaatagcgggcgttggaccttgcgcagtcgagcaccgtacacctgtaagggctgaaacaccgtccgaaaagggacccggccgcctggttatggggcgattggtctgtttcagacagcattaagcccctgtgggcgaacttagttagccttccgaggtgatgacggcgttcattggcgttcatcaccccgttcgtgggctggtgattgggctgggatcatccatgtgggactccgatggcgaagtttgtcctttggactccttttctggccctttctgaatggctgattagtgacgagagacgttggacatttgaattctggttggttgtgtgctgtgttcctgagtttttcccctggtacctgaacggttcacccgtgtccgcgggagcttccaggggttcattgcatgtgacgagtatgcatcaagcactttatgacctgatcacatttggactggaaaatgataaggatgtgggacctgtctattcaacatcagacaaagaggcgaggtaatgtcgggttgcatcgaaatgctcaaataaccgacgaggcgctggtggctgattgtggcctgctttctcaggcattctcactcaaaaacggatttttctttctttcacataaatttcttacggggaaatcatggaggggtactccgtcgatgatctcaattgatcctattcaatccctattagggccactttattatgcattatatttctaccctagctatggtgtacaacatttcggccctattggcttcatctttttacgcttgcaatagccacgtcctgcaatttgaacacaaaaaacacagtcacaacgtacgagagatattgtcaaggctatcatccatattgcaatatagtgcagtggggtgctctcggtaaaacaaagttcttaactgttaacgcgtacttctccgcctgtctaacccacaatagaaggtcaaagaagatcatcgttattcatttctatctctttcaattttacctcgagttgatagtgtacatccaagtcatggatctatcaaacagtgatctcggtcggatcgacacatatcttcggacttccgaggctggttcatgcaattccatgcatctgatgtacaggaagcatgacagtgatagacagagcacctacggagtactccgtactccgcaaattgcaatcacctacctaaccagcaatctcgcacatgaggccagccaccaaccagcagtgatctgcgatcccttggtagcaatttcgaattgcaattacaatcgttctttttgaaatcgcctcgtattagactaacatgtcaaggatccgaatgtatggatgccttaaaaggcgctaaatcatgccagatcccccaaggccccgcaatacaaagccttcaatattgattgtgagtaatccatacttcacaccggtaactaatttatattcaaaaaatcaatatttagtcgaaatatattaacaaccgacataaacgaccacctgatcttcaaaatgaatgctgccccgctctgtcttggtttagttgtacagcatagatgccgctaagacatggcgaatccagctgacattccgacgctattggacaataattggaatatttcgatgtcaaggactagttcacccacgtggccactcgttgtacaagaagctaattctcactgctgttttatggaatgcgttttattgcgtcaatattatgtcaaaatagatatacgacaatactagttctacctagcatgttgtagtagcttccacagaggactgtggctgaggctgactgggtaaagctcgagccttatgagcatcagcccattgacactaataatactccgttgtgagtaagtcattgtgaagagagcacggagactctgtactatatatatcatagctttaaccttgttatgaggatatcagattttattgctattcttgaagtcttacgcggtgttcgagtggctcaaagtatgagacatcggattagtacaaggtgatcgaggtgaaccaccaagagttgtcgaataacatgtgcaatcatactgtaagtaattaatctctcggagaattctacagcttttgatagacagaatatccataatttggcccgcaaatcccgtcatctatagtacagagcacgcgcagccaaaatcaatataagcactcatatctcaaggggtatcttgtgattcgtacggagttcataatagtccctcatacaaattcatgatcgtcactcatcatattagctagacttcacagccatcttttttaactcaatgatcagcccgaacagcctcctattaaccagcccctgatagtcccagcccctttcccctgtctacgatctgcgatgcacggaatacaatacagagcgaaggctgacatcatacatacagagattgtacttcgtatgaggaagtacagagtacaccgtacatatatagcgattggaatccccttcgtatagtgacggattaggatttacttcagaaaggtctgttgcatcacgcagtggaatgtctagtcaatattaagtcagtcccgtacagtgatctggccaagtcattgacacctagtatacctagcacttgaagagttgtggtgaattttacgttgagtgaatagatgatatccatgggtagcaaaataaggatccaaggctcacgtgtgacgtatccaccgtggaccgcacctagaaggtttgccgatatcgcggcaaaccttcccgcaataccactgattttgaatactcgatagtagtaactcgaagattccatgttaattcaatctctacaacctgttatcgaaaacaaattgattgagagccgcggtatgttgaagaatctcagcctccgcacggcatcggagggatatttgatccgggaagttggcatcgggaccgttatttcacttcaaccctcctatggtcgcaaaactcattttttgcatcaaaatttcccgacattgagactttgttatcaactaaataaatggcaatcttggctgaaatcatgtaccagcctacgaagagataaatacaaatcttatcacagattggccttggtgagctccaactcagtccaatcccataagcgcttccccatatcctcattgcacgcccaaatgtttcgacgtttcaaaattccaacaggcacataatatcctccattagtgagctcctccttcttcgcaccaacagcagcccacagcgagttacacgcgccctgttgcactgtggaaccaaacaaacgcaaaaacttggtacccaaagcagcaaatatagaagacgaattcagagcgtcatacaaattcgttatgataatacctggatgaaccgacaccgacgttatcgacggataccgcctgctgagttccgcagcgaagagaatattggcagccttcgacgctccgtaccgggaacttgtgttgaccttcttgagcttctcttggtccaggattttctcaaatgccggcgcgaaattatgccccacggaagtgagcgacacgacgcggacgtccgagccaggctcctcggccgttttgagcagtgtcggcagcagcaatttggtgagatagaagtgcccggtatggttagtgccaagctggatttcatggcccatttccgtctcaccgggaggcagagccatcacgccagcattgaggattaggacgtcgagacgggtcgactgggcgttgacttgttccgctgcgttcttgatcgatttacttgacatcaagtccaacggtatccagctaatctcgacatcatttggaacggatgatttaaccgacttgatggcttcttctgccttgactttcgaacgcgcgccgaggaagatcttcttcggattgtgcttggccagctggaggactgtttctttgcccaaacctgcatttcctgtgaacgtgcatcgtgttagatgcggtattaatgtgccgttgatatacggtttaacccaccgcctgtgaccaagatgaccttcccggtcagatctgggatatcgctttcgggtgtgaagcttactgcacccacatagttgagtgcgtccatagcagctatcacccatccagacattttgatgaggggtaggaatactgggattaaggttgtgttcgcgttgaattggttgatagccgatgctatatatatacatataagccggagtaactatcccccgagctgacctgaaagttgacacaaaggctaagcccccaaacttcaaatggtccctgaaagtctgtcattctgaaatggccattgacttgagggttcaaggaagccacctgcaatactactagccgagaaatgcgtggtaggtctacggatagcatttgccttactcggtttgccaagccgtctctggtcttgtacggagttacatcgcatggagaccggggaactgcataattggcagcgaaagcatgaggggcggtgataaaatggtgtaaagcagcttaatgcgagatggtaagatattgagaatgatcgaggtcacaaagcgtgctgtgcacgtttagccaggcacccagaggcgtggctatagttggtggtgtgaaggccttgagatatgagggttgtggtaaagatcaggaagagtttctcgacgagtgcgcatgggatttggatatgacgagctgtggtggtagccgccccgttgtggatgatcagtgatgccagcgaggtgctcaatacaagaaataggaattgatatagaagctaagagctcgtttgagcaaggagaaagcacttaattacacaaggcgagcaaaatctggtggggtatgtataaatgacattccgagatcgaacccaatgcaccttgaagttcaaatatatagctgcttctgacaagtcaacgactgtcattgtgttgctctttctctttcacttctcttgagaccgtttctgcctcaggttgataagacctcccccctacattgttcgatcttccttcctcttccctctctctttgctagctaacaacccatggtccctttcaatcaacttcctacccttccctcttgcaagtacctatcgtcaacctttttattacgtgttggctgaaatctcatccatctacgtatatatattggccttatgggtgagtgagaaatgactcaaagttgaatgcaacatgagaggccattaggccctcctccttgccctacagagcgtgaacgtcaactctggatagggcgccaatagaccacccacgcttctggcgcttctcaacacccccttggtccatgccaaagcagtgttgatgcaagtcatgggctatcaaagcactgctgcttgcgtgatgagggaccatcttcccactgcgtcgttgtccggggccttggtctagaagcctgtggaaactgccattgggctgaccaggacaatcgctcctatcataaataggctgttgcaattcacgcatcccaacaagctcgagatgataatatcaatataccgccaatcgccctcatataatccccctggattcccgtgttggtattcccccacacgaatgttagcgagaacgagcacccacctcaccgatttacacttccgcgggtcctggctcgggatctgggacccagctagggccctataatgggccaagtgacgaaacccaactccaaacaaccatacattctccgctccgtcgagattccattacagaaagtgaagccgaaagcttatacgactaaaaatacattgatataaatcatatgagcacttaacacattcggtaagtttgagtactcacgctatgtctattacaatagaatgctaatatgaggcaaattttgacagtggaaagggcgagagcttgaagaacgtggataattccaccgacgcccctggtgacataggtcttcacttttcattaactataattgatgagaagtcaatgggtggcctagatacattgttttgggttgagcagcgatgccgtcagatcttcccaaagtctcgcgttcctttggagggttgactgtcaaaggccaccaaccttggaaactccaagactcgggtggagttcggggggcctccgctgcctcacgtgccggaagacctgacctgaccctacgatcgttacggacaacataaactcgcaacttctactctccaacaaaggtagaagggcagctaacagatggatggcgctgcgttactttttcattgagaacgcagttgcacaaggacaaatcaacattctccgcgtggacaccaagcagaacattgctgatttcaccaaggccctggcgaaagatcagttcaaatcttcgtacagctgcttggcatgacctgaataaaaggaggaattgtgtttttcatataaaatcttcaagagttgggatagggtctgtgagggggaagatggggcggatcccacatgttgtgtccgtaccgccctactgtgtaggtgtagttgcaactgttcgtcgcctcatgagcaggtgttaaacacctaccagcaattggacaaatttccgacacatatgctggcagattgtgcaaagtccacttccacccctcacaattgtgcctgccaaacctggaacctcgacctcgcgccgggtcgttccttcttaaaccgaaagcgaagtcaaggtttgcatggttttcagcgaggtcgccaggaagtgcatagaacccagtcgcggccgtagattgttttctcttttccttttccagccttgtacttagaaccccgaattgactgtacttctttcttccaaaaggaactggcactcaacacctactactcaaatagtactatggtttggtcttggctttgttttgattgctttctgttggtttttctcttgggatttgtgtctgttttgttgtgaatccggccaagaccttttttcaaccctcattactatcgaatagtccccgatatctacggctaggactccactgatccacttgttcatctatgaatggttggcatagctcccaggatgcagcaaacagtacactcattccgataatcgaaatgtcgagttcggcgaaaaatgcctattcacaatactcgtcgcgaggctaccatgagctcgtcgcttttctgatgaaagtgtttgaggtgatccaactagacccacgaatgggattgacttacgtgctctctagagagcgtataagaatgccgccgctcgattagacattgtggttctagcagataattacattttgaggcagcccgctaagaattggaaggaattgttacatctgatataccttccgatttggtatatactgagttattaccctcactttctgtgggcgaaagaagaaactcctttgtagaacctcattctatcggaacggcgaccttcatctgtgccttgtgtagttgttaggctgcacttttctttcattttgcccgaagctatgcatgtgacttagattcagatgatccctaactgtgagctgatatatttatatagttctcatgacaccagggtagaacgaatgagtatggatcactttattattcaatcatgcggcgatttcattgctctatcggatcaacaccattcaaaagccgtttaatcttccagagggatatcatcgcgtcaataccgagctgctcctctggtctgaagaacagtgcagtgtgttggaactgaccgtgggattcacggagtttgttgatgtcagactctgaaagaagcactgacagatcaaacacaggaaccttcgacccagtttgcgtgagagccacggagtccaaagagctactcgattgagacccatgatcagcagccgcggaattctgtgagccaagaagcaggactgcaccacattccatacgttcaaatggctccaggcttcctagagcctccttcagcgcagcatccgagtactcgggtagatccagggccttccagaccccattggaggtgtcgacgcgcttgtatttctcgaggactgcactcagcttcttgacaacgacatctctcatactgcgcaacattaatttcggcgtatccttcgaccaaacaattcttttctcatcattcgccttcacaggcccctggggatgcttccaccggaacggcaacagtcgcataatggctggtctttttccacccttcctggagagtggcactgaaatagatcgaataagtggaaggagctcagcaatgcgaatcacgagctggcgtccagtgcgcttatccgaggattttggaattggtgatgcaattaagggacccttctcctggccttgtatcgccatcggtttggtttcttgttggtctggaatggttggctccggcgatgagctaaggttcttggtcttattgctttgcagcgagtcctgcagcagacccacagggatcatataaagttcgtccgacgttggttgtctaataagcccccaagtccccagcagggcagatggaagtcgtgccccagttacagagcacatacgtgccggcgaagccagcattaaggcccatgggttcttgagcaggtcggcttcctcctgtgtcgtggggcgtctcttgcgattcttctcaatcccagagcgaggatgtgtaaggagaggggactgcggaagccgttgtgaaggaggaacagtgtctggagtcgaattgtctgtttctgtttccaacgtagtttcgttgggttggttggtttttcgcgaggtcgcgatgccgcgattgactgcctgagcatgtgaagtcgctagcagttgtcggaacgcactcaggcgccattttgcgtatgggatgcgcttgcccacacactccattagtttgatggctggggaatagagctgatggtgagtcgagttcagttgagggcggaaaagatgatctcggagctgttccagtagccaatcggagccccttatttgcggagaagtttttgatcgaatagtgattgcgattcgcgttacagggcgtaagaagacctaattagcttctcaaatactagggaaagcttgtctcctagaatcatccgattctagacaaagggtaatagaagtaggccgtcgttggcattgtcgctgttgtccgcctgagctccttatcttagcgccgctcttatcgcgtcacggttcaccgtccctagcctcccggctgcgcgcatttccaactcggaacaactacaaatcgcctttgcatatttttgaagatgcccccaagaatacctttgcgccagctagggcgatctgtccaaacctcacccattgctattgcccggccggccggattcgcacgatgcttctcgaaccaaggacatttgctggcgcagcccccgcggagttggacaccgacgccattcgtgacagagacagtggtatgtttgatattagccatagcaagcaggtacttggtgtgcgtatattaattacattgaacagggaggtggctggcacacgtgtatgttgcgcaattgcatccgtcgacggagcttgcatatgacccgaaacatgatcagcatactaacctgtatcgcgcaatgcagatgatatattttctcgattgatgaaggtaattagaaaccaggaggacactccttctacaacctacccatgctaatcaaacctctaggaacgcatcatctgccttaacggcgaagtcgacgacaccctctccgcttcgatagttgcgcaactccttttcctcgaagccgataacccagctaaaccaatccacctttacatcaactcaccaggaggctcagtaacagcgggtacgtggacctgccccacggctatccccgagctattctgactaacgctctcacaggcctcgcgatctacgatacaatgacatatatcgcctcccccgtgagcacaatctgcgttggtcaggctgcctcgatgggctctctccttctcgccggtggcgaagcaggcaagcgctactgtctcccgcactcctcgatcatggtgcaccagccctcgggcggctacttcggacaagcgtccgatatcgctatccacgcgaaggagatcctgcgcgtgcgcaggcagctcaatgagatctaccaacgccacttaactggcaagaagcagttgtctctcgatgagattgagaagcttatggagcgcgattactttatgggtgctaaggaggcgctcgagctgggtgttattgatgagattctggaccgtagagtccagggaaaggagggcgctggggaagagtctaagcctcctactgcgtaattgcatactcaatgtgtccatggtgctttggtatataccagaggttctaatgtttagcccataggaaggaggtgttggccaataatcaaccgaggaactcgcgctttttctacaaaaccttaggctctggttgtttggtcattacactagcgaccagcactgactaggcccaatcccatcggttggcttaaaaagctggcctgctcccttctttctccctaactgccgtcaactcccgaggtctcttccttcaaaaaagttttttttctctggttagcccagacactattattcggcaactctcgcctgacaaccatcacatctgtgtcttatgtatgtcagaatggaaccgcccggtgcaaggcctagcgatgccgccagcttatcctccatagcaagtagcgcacggcttagtgggaatggccaccaagtgccatgctcgtagtatccaaaatggcgtgttccgccaagaacaaaacgggtatagcccatgcacgctcgtatgaagatcagaagaccatctggagccaacaggattggtatcaactaccaagataatcgccgaagccaccacaagaactgcaatggcactcctcatctgaagatactcctacttattcctaagacacgctctgatcgaaaggtataagaggagagaccttgttcttttcttgggcccatactttaattgttccctctccgaaattgcggtatatacagtcacataattctatcatattgcattcgcacgctcaatgcgaccatcagtcccaacctggagaccaaagcgctgccgaaggaacgttgccgtttcgggagatggcacaaagcccgatgtcgaccgtgccgccgcatttgagtggcgccactgatcacgaattgtacccaggaagctcatgttgacaataacagcctcgccagctgcaaatgtatccatcgggtgctcaccccgaccagcacttccagattccgcgtcggccgggtcggccaagagcgtcgtgcgctcatcttcaacctcttcgtctatgtggttaccatcatgagcgggggaaaccgtttcaccgccatcctcttgtcgtaaaataccacgttcttcggcgtcatgatcttgtgactgggacccctccgcatctgggcttgtatctgtgattgtatctgtgggtgtatctgcattgggcgttgcagccactggggtgggtgttccattagtcttcacccgctcgataatcaagcccagcatgatgaaatcgattaggaggattaaaaggtcgaaggaaagaagccggtaaacagatacgggagcctgcccgatgaagtcgatgaacagtcccccatgtaggtagccgcgcgtttcctcgccagcttcgggacggatcaggaaagcatgaaagagcatgcagatgaggttactgccaatgatggcgccgacgaacggttgatggcgtgtgggttcgaaggggggtgcttttggcgtgaagaagatcaattcgacaatggcacgtattgcaaataggacaatcgagcagctagacatatgttagggttcgccgcggtgagagggtgggaccattggtttggggttgatttactccatgtaatacagggcggaaagttgacaataaattaatatgtcgagatcgcgcagcaatcgatcaatgaacgcgactttggcagttgatttgactttcttcacacgcgcattttggctgctgagcgtgcctgttggcctgggaggctccgcatcgtcataggatatgccggacacgtcagcgatgtattccgcatcccgaaaggcatcaacgtctgtcatagagggtcatgagggcttggacagtatccaacaaacgaaggtataaggagtcgaggtggagactccccgtgatttggtgagctggggtacagtagttccggtgtcaccacctacactgtttgattgcttgatgccaagatacgctaagctatctctggcacagtcagctgatttgcccgataccttcatatccagcttgaagagccaaggtatgggtttatacatggtctatcttgcttagaacgtcaatttaatatcgccttctcaatgattgattcacgtgaaggccttagtttgcggtgggtctacaaaatagtcagtgtgttttggattatgtttatagctcaggttatcacgtgatatatactccaattcgaaatcgcaacttgctcttattcaacatcacattggggtttttgtttttgaagaaaaaaaccaatcatggataactctgaatccaatctgaatgtagcaaattatgtcttggaatctggacaagctgttcaaagttatgagctcatacgtcctgcaggtcagtgttgcctattttcttcgacctaaacaaacactgatatcaatgaaaggcgtcatcgagagcatgtataaaattcatcatgatctcggcatcttttcaaacacaattgtttgtgcgacatatgagcgagcagacaatatgcccctaactccggacataatgtacaaggctcttcccctggtgatttcggaacatcctgtcttgacaacaattgtggtgactcaaccatcgacgaagaagacgggaagaaaaatgacttggcaggcacgtctgagaaagatttgtttcaaagactgcgtcagatttgtggatattgcggctgagaaagagcagtctattcgattgctgcaggaggagcatgacacctggttcaataccgaagataagacgaaaccgctgtggagagttgtggttaatggctcgaagatattattcatctttcaccactcagtctgtgatggcaggtcagggatgatattccaccgcagcttactcgctgcacttaataaagtgaccagggagcaacatgagagtgggaaagaggaagacataccaaatgattttgatgtgccaaatcatgagctgaagcctgagtcaatggctcttcttcggcttctcggcatgaagttcagcttattcattggtctcctgagctacctctcctctcttttaatcaaggtcttcctacggaaaaattatactttcttcaacgatgtcaagttcgaagagggtttgccctccacagacaacccagtacctctcgcccagcggccagtcaccaaggttgaaaggatgtgcctcagctcgtaccaactcgcagcatcacttaaagcctgcaaggaacataaaacgtcaatgaccaccctcattctaactctgattcacgcgacccttgcatcggatgtttatccaacggcaaaaatgggcttatcgtatcttgcagttgacctgcggcgtttcctgccggccgagttttctaacactatgggcaactatgtgtccagtcatcagaccaattactggctcggcaagtaccgcagagccggagctatatccccagctaacgatacacaaattgcgctcatatggcagctaagtcaaaaggctaaagctgaccttgattctgcgatgttcacacatcgcacaccacttccagtggcgaacgctttgggattgacagctattggggaagatgatgagtctatcgcagcgggaatctacaatgttttagatgtcgctgtcacgaagaccttttgtgtgtccagcttggttgaatcagaaagccaatcatctgggccttggcagctgaaaggtacggagttctctgtggcagcgcagaaggcacgggtgggacccatgttgtattttgcaatcggaagcatgaaggatggcgagtgtgtaatcaatgttagttatgaggagggtgtgctccagagcagagttgtccggaaaatccttgagggagttgagagacggctgattatattgttgggagctgaaaatgcaaattagaaactgaacattgatgtaatgaggatttcagaacccatgaatgccaccaaaaagactcaaatcaccttgcctccttcgcttcttattcctaatgtaatttatttcgtaaacggcctgtgaattagtacattgtggcttgcttccctagtaactgcaggtactgcgccctgttccaagcacccaatagcaaaaatacctcagcgacgatctgatatctatacctagcagccgagtaagcagtcactaccaaccagcgccctttatttctcaaacccgagaacccgtgagagatccgagaaccaccaagcactacggcaatccgtcccgcaatcccgagtcactacggagtatacttgatcttcttaggctcgttatcgttatagaagtggctgtgttatattatttatatatataatttacggtataactagttatttactataactaagccttctataaatagaccaagctcttaaatgggcggtcaatttatgagcggttatatcggtagccccagggatttaccacaatatccacggggcaataatattactgaagaataatatgactgaagaaaaagctgccaatcactgagcgccaaggtcactctgttatgcatctcctaaggatctgcatatctttcgattttaggggcgcgtagtcaaacagtagcttccctctcagccacccctgtgaaatgcactaacgctggagggtctcagtggctatattaaatctgctatggcccttgattttatgaatattgacttattgtgttcaactatatatcaaaaatgaacggcacaattataaatgactgggttgacgagcctgatggacgagggacgtggggtattctatccacttgcgttctaacaattattctctgttgctggacatccgtgtccccaaatttacctgcgcaaaccgatggcgcgtttacgagatggcgatacaaattcgatctggcttgcattgcactgcttggatctgagttcctattgctgctggttctaggacagtggtcgtccgcccgccgttctattagagtaggtgataacttataagctggttcccaagcgacgagaaactgacagaacaggatttccacgacgccgggtataaaaattggacgattaagcatgccttcttcgccgatatggggggatttttaattgagcctccggaaatagattgcttgccttcattccctctcaacggcaaacagctttttattttggtcaaagggggatatgttgattatccgagtataaaaaaagaggaaatcgaagataagagcaaatcagatcggcttgctaggtaagttaaaaacttacttcagtcaagccttttcttccgcttcttatactgactgtggcgggtagattgatcacaatagcccaagccctctggttttgcttgaattgcgtctttcgttttgcacagggacttcatgtcaccactatcgagcttaccacgctttcctttattctaaactttcttgtgacgtcttattgctggtatcataagcccatggatattgaaagaccagtcactttaaagctcaagagctctgtggctaccattcgcaaaaagctcgaccaaaacccagagtcaaagtggtatgaaacgccacttgacttcatctctcgtaatgagtggttttactctcggttttggagatattacattcaaatctcgcactctatgcgaatcccgctatttactcgacctacacgacgcccgtatgatcgcattccgagccatttcataccagtggtggatacccaggccgaaatcatctgtggcccagtaattcttctcttcagttctatttttttaattgcgtggaattatcatttccctacagagacagagaggctactttggcggattgctagtgtcgatgccctagcctacgcattggttggaggtcttcttgcgctatacttccacagaaccatattccaaccggacctcccatataccacagcccaagcttcattccagcaaaaaggagaacggcatggatggattggtcgtatcgctgcgagattgagaaatattgatcctgagcaggacccaaacttggaaattcctattcgagctttggttccgatttcgtttctctgtgccatttacgctattggcagaggatttatcttaacagaagatttgattgggttgaggagtttgccggagagtgcgtttgagacagtctcgtggtcgaaatatgtacctcactggtagccatgatgcgctcaccaaatgtgcttcacttcaaacactacgatatcacgaattttcagagattactcgggcagctccacgtgccactgtcactgtcactatcacctcccccttcttcctgtctatcactatcatcttcatcactgtcgctgtcatcattaacgttgttttcgtcattttctttgccttggctcatggaagccatcaccctttcactcacaaactatccttgcgtttactctataaaggtaatgaacgatattgatgatactataagtacaaacgctatatttgaatcaatataagtaatatatatacactccgttcttctgagacttggaggcttgaaaagtctataactagaaatcgataaacacgataaggatgttgatagatttaaaaacaattttgtgactggacctcgacaacgaaaaatttgggagaaacaatgaggttcgagaattcgaatactcataatgaccagctaggtttatttgtgttcctttcagatcctttctcgcggttatctttgtctgcttgacagagaatcatccacagcaaacaaagattccaactaagagacccacttctagcgaacactctgtaatccgattgtcagatcacctatcaaacggaagtatcggctctcattggtaacaaacataacatcctagagccccgtatcatactaagctaagtctgctcgacatcatgtgttacgatcgcaacgtttgcttgtttgttatttgctttactgagcgagagttggtaatttgcattgtttacaaagcggtcaggacacagctataagaactagctgtctcccactttgcaacttgcttcttctttctcccctatcttagttattttgtattgaatgcactctgctatctctgaagacctggcacgtcacattataagggagaaaatgacagagagcgtgtatgaatggcgtgatggtctatcatacgccaaattatgctctcgcggcaccaacactgggcaaatgttccaaaatccgttgaaatcactatacttgttgagacctagctttgaggtcacagagtatcttgacagcggtgacatgaccgttgctcactgcccattgaagcggagtccggccactattatcttgggcttcgagattcgctcccagtttagcgagtgtctcgatagtaggaatatgaccgttcattgccgcgtattgaagcggagtccggccatcattatcttgggcttcgagattcgctcctagtttggcgagtgtctcgatagcgggaatatgaccgttgcttgctacgcattgaagcggagtccggccattattatcttgggcttcgagattcgctcctagtttggcgagtgtctcgatagcggtaatataacctttgatcgccgcccattgaagcggagtccagccatcattatcttgggcttcgaggttcgctcctaattcggctagtatctcgatagcgggaatatgaccgttgcttgccgcgcattgaagcggagtccggctattattatcttgggcttcgaggttcgctcctaattcggcgagtatctcgatagcgggaatatgaccgttgcttgctgcgcattgaagcggagtccggctattattatcttgggcttcgagattcgctcctagtttggcgagtatctcgatagcggtaatatgacctttgatcgctgctcgatgaagcggagtccagctatcattatcttgggtattgagattcgctcctagttcagcgagtgtctcgatagcggtaatataacctgtgatcgccgcccattgaagcggagtccagccattattatcttgggcttcgagattcgctcctaattcggctagtatctcgatagcggtaatatgacctctgttcactgctcgatgaagcagagtccagccataattatctcggacatcaagatcagcttttgccgctttgagtaaccgcgcggtatttacgtggccgttgaaaactgctagtgacaaagcggtttcctggtcgcagtctttgagatcgtgtttggcattttgcttggtcaggacatgtactacatcttcatggccccgaaacgatgccatatgtaatgcagtctgcttcttaacaccagttgcgttgatatcccacttttgtaagagttcatccacgattccagtcacattattcatcgctgccagatgtagagcattcaatccatcttctcgtttcaagttaggagtagagcgtgccagcagtattctcatcagttcttcattgccacggtctgccgcgaggtgaagtggttcttcgccactggcagtctgctgttgaggattcaaccttttgacaagcagcttggctacctttgtttggccataccaaacggcatgatgtaatgcagaccaccctgatttatcactctggttcggatcccgtatcttctccaggagagcttttgtgttgttgtaatcaccttcaccggcagcctttatcaactcttctgataatttcaattggtcccatacggtaaggtcaagtgttttcaaatcactttcccgtttcctgtattgcggattgagtgaaccatttttcatatcctcgatcatgctctgagcattttggctcctttcggtgctttgatggctgccatcgtgcgtcgtctcatcttttccaacgtgaatcttgaatagatcattcgggtcaaaatttgggatatttgacctgattaatggcggatggaaataaaccgggccgacataatcacaataacaatcgaaatggatcttatcgcgcctaaacgaaggcttgaccagaaggcctctgcttattctagtctcactaagagtgggatcaggctcaatgagtaggatatgcttgtctttctctttttgggcgaggcgaacctttccttctatgagtggatgggcatgacctaagacaacgctttcgtctttgagaaaatcaagagaaatgatattccaatctccgaacaaattcccattctcttcaatctggaggacatcggctgaaagtgtaacaggtagatcatagatgtttgtagggcaccagttgtatccattcgtcatagttgctgaattatggaacagatgcgcatgtgatattttgccaagtttctgcagaatctcttgataaatcttctgttgggggtagttttctggcaattctattccaacaatgagtcctgaaatgatcgccatgtctcttggccaagatgtgtggcgtgaactgagaattgctagaagatcatccaatccgtcaacttcttccctccgaaatcttttgagtatgtctttcgcaagttcatgcttggtggtagggcaatcattgctctttgcttgtaatatgtctctgtctaggtccttcgtgatcgggccctcgggacctttgaaaatgatttgaacagtctgggacattttcaactccaatgccgtccagcctcggctgaaccaaggagacataacgatgtaaaagcatgctaagtctgcaccacgccattcgcgctctctaaggaaacaatcgtggaccagtgtgaccgccgcggccttgtagtttaggtgcatgcgctttaaagctttttcgcgaagctctttctttgttggaatgcagatagtatcccaccatagaccctcacagttgaattcgagagcaaatttttgaaacaactccagcaagcagctgttcacatcgccgcgggcttggcttccggtgccggtaccgtccgaccatacatgggatattgccatataccgctcgttgtctcgaagagttcccgtttcccataaataccacgctgtgatttgttgctccttgcggacagctgcttccagggtttctgaagggaaattttcaagaggacagcggcttccatcacaaggcggttcgtggcgctgtgtcaccagagtgaaattgactcgggattgctcgcaaaaatcgaaagtacacagctgatggtcttccttttttgcctcgtggggtgaattttccagcgaagggagtaatttcgggaattctccaggacctcctagtaggctcttggctatcgcccagacgcggttgcgacaaaagcccaattcgttcgtggctttgtcgactgctcgtaaggtggcctctgtatcggctaatgacaaggacatggctctaggggatttgtaaaattcgaataaatggtgtgatactggattgttcttgaaaaatagcagcgttatggaaaatttggaaaagctgacacagtgccagtgattaatattcccaaacatgggcggctatggagcagggccatatctccggagtattggcgctcgaggggtgatgcatggctatgtgcatatgggcaggagttctcgtgttcgaggtacgatggcggagtccaatcgagggtccgtgcagtctcgattcatgcttcgcccacttgactggaaatgaatcgaatacaaactgttgaggcgaagagaaaagaagaagaagaagaagaaaagcagttttgaagaaagactgagcttctcaaggaaaattatctgagagaataacagccatgctgaactctgcggaccctgtagagtaatgtgacggaaatatgcagtacgaatgtaattctctgctctctaggaaatcttggactaaataatttgaataatcaacgtgaatgtgcggaagtcgggtcatttgaggttacttttggttgagttgggtgacagctagtcacccgcgcactaacctaacacgctttgggcgtctctttcatgagtcggccactcatctcacggccaccacgaatgggttctaacggtgcgaagtttctgtggtgtaatctcggcgctacatgcatgtaagtacccaatttgtcaacagggcctgtgcctggccaggactgttcgtacccccaccacatccttctggatttcgacgttcaacggacattatattcctcattacgcaattttcatttgaacacaattcttccttcttcgaggaagaaatcatggcgccctttctcgctaccttactatcccgtgaacctcgatttgatccgactgtatcctctaacgaattcaggactcaatgggtccaccctagcgatgtattttccgtactactgatcctgggcggtgatattgttgctcgcgcgctggcacaacttgcaggaagtggtctgacgccagtcacattctcgtttggtatggcatctttaagccctattctaacgaagattccatgctaagtcgatgtactcgaataggatgggttgcgtactccgtttcggcgcttgtatctgccgttggcgaaaacaaactcatgccacagaacgtggattgcaaatgcaaagtcatcaatggcaagagtggatacagtagagacaactcgagctgggttataggccgtattgtgcgcgattttgatacatggagcggcactgctaccaaagagaagaccaaaaaacttctgggggaaaagtgggaggaactcaaatccctcgataaggctgcagaggagccaacaagagctggtcttgttgttactatctacgagccgagtgcgacaccaaaggccggcctagctaaacgcgatcttatttattggagcggcttgtttatcatgttattgcaattgggaatcgcggctataccatgtggacttttcggcgattggggcattttgataattacggcatgcggcaatgttcttgccatcgtgactggagttcttccacaatggaagaaggaaaagtgggcgtgccggcctaagtccaagtattcctatattctcactcgaggtaacggtgcgcaacatgccatcgttattcttggtaatggacatggcttgaaccttgaggatttggcatctgggcagagcaatgttgaatcctctactaataccttgacccgagctgttctcctcgccctctctatattctgggtacttcttctcatcgccgcagcaggtcttaggggaaacacttggtttcttctcgccatcggcggtattggcattgttcagaatgttttcgtcgctggtcgaagcatgaagccggagaattatggcattcatctagattatgtcgaggtcttcggtaaaacgaaagttatggatacactcttggatgttgaacagaagtatccaggtataggtcggagcatgcgcgacgagttctttcccggaaagcttcctctagccggagttcgagcgtgggaacagatcgaacaatccactgaatctgagcctcaagcgaaagcgcctcgggagtctcaagatgactctgaagaaactcaagctgaagagcgtcaagttgaagagcggatctaaaaagatccgaggacggctattgcacttatgattcaacgtcatcgcatagatatattgttcggtgatcgctattttcgacctgttcttgagcttatgatgaggcccaatcttctcccacaaggccggtaatgataggaaaatgggacggggagatttcattcataacctcctcggctctaattgatgcatcctcctattattgtgtttgattggaaggtctaaatcatttcttaccggaggaatcaagtttgattaacaggagcatttatttgaaaaatatacgatgcattcccttgccactctttgttcttatgcgagtccgagtcatcgcacatgccccgaatgaccaaacagggaaatgattcattagcctgcgacctccatctcaaagcaaaaaacgtcttttcccgctggaaggctatcccgaattgaagcatcctttatcaattgcttggaggaagtaagtcgtagtttataacagggctatcctcgtgctcggtccgctcgcgtcgcggtaccaaattagaagaatcatccgcacaaaacgcagcaccgcatgttgagttatgaataacttcgggctgaaacagtatgtctgtgactggttctggctgttcgtactactacttggagctctgttccttcgtatccagcaggcgcattgacatcagcctttgcggcgagaagtcgctctactacctggagatggcctccatgcgctgctgcttggagcgctgttcctccgtatccagcaggcgcattgacatcagcctttgcggcgagaagtcgctctactatctggagatggcctccatgcgctgctgcttggagcgatgttcgtccgtatccagcaggcgcattgacatcagcctttacggcgagaagtcgctccacgaccttaagatggcctccatacgctgctgcttggagcgctgttcgtccgtatccagcaggcgcattgacatcagcctttacggcgagaagtcgctctacgaccttgagatgtcctccttgcgctgctgcttggagcgctgttcctccgtatccagcaggcgcattgacaacagcctttgcggcgagaagtcgctctaccacctgaagatggcctcctcccgctgctgcttggagcgctgttcctccgtatccagcaggcgcattgacaacagcctttgcggcgagaagtcgctctaccacctgaagatggcctcctcccgctgctgcttggagcgctgttcctccgtatccagcaggcgcattgacaacagcctttgcggcgagaagtcgctctaccacctgaagatggcctcctcccgctgctgcttggagcgctgttcctccgtatccagcaggcgcattgacaacagcctttgcggcgagaagtcgctctaccacctgaagatggcctcctcccgctgctgcttggagcgctgttcctccgtatccagcaggcgcattgacaacagcctttgcggcgagaagtcgctctaccacctgaagatggcctcctcccgctgctgcttggagcgctgttcctccgtatccagcaggcgcattgacaacagcctttgcggcgagaagtcgctctaccacctgaagatggcctcctcccgctgctgcttggagcgctgttcctccgtatccagcaggcgcattgacaacagcctttgcggcgagaagtcgctctaccacctgaagatggcctcctcccgctgctgcttggagcgctgttcctccgtatccagcaggcgcattgacaacagcctttgcggcgagaagtcgctctaccacctgaagatggcctcctcccgctgctgcttggagcgctgttcctccgtatccagcaggcgcattgacaacagcctttgcggcgagaagtcgctctaccacctgaagatggcctcctcccgctgctgcttggagcgctgttcctccgtatccagcaggcgcattgacaacagcctttgcggcgagaagtcgctctaccacctgaagatggcctcctcccgctgctgcttggagcgctgttcctccgtatccagcaggcgcattgacaacagcctttgcggcgagaagtcgctctaccacctgaagatggcctcctcccgctgctgcttggagcgctgttcctccgtatccagcaggcgcattgacaacagcctttgcggcgagaagtcgctctaccacctgaagatggcctcctcccgctgctgcttggagcgctgttcctccgtatccacgaccttgagatgacctccttgcgctgctgcctggagcgctgttcgtccatttccctctgcggcgggtgcattgacatttgccgttgctgcgagaagtcgctctaccacctgaagatggcctccttgcgctgctgcttggagcgctgtttggccacacactcgtgcatccacgtgggtgactacttggagcagacttggtagtaattcactgcaaccttctctcgaaaccaaaaacaatccatgattcatgagagcaggagaatcgcgtccgtgttggataatacacctggcgagacgatgatggccattggtgatggaacttcgaagtatatgacgcttgatgttctctgttaaaatataaggctgacgccttatatagtacaaaagcaagtgataatgtccatatgctgacaaccattgtatcgtctgcggtacatcgtttctatcttcgtaggccttctgcgctgactcccatggtctgtatgcaacaatatcattcccttctacacatcggcagaacaatgaccaagccatatcctcagattcgggatgtgggtttgtgaggtgattgatccagtgatttcgggcgtattcgagaaagtgaaaacctcggctttggagttccatctctagacgtgaagactctttgtcaccaagtatttgttgggccttcctctctagctccccagcgctgagatgccgtaacttctcacggtaagaaagtagcctcagtgccattcgaccagtcatactgctgtaactgccgaagggggacattccaagctgaacaggccgtataggagtatttgaaccattctgaattttcgtcaactgacgcttaaaatcagtgaaatcgaggtaggtcatgcaaagaacgccgatatgccaatcaagtcccgccatattgaattcctccgagtgtcgggagttcgtgccaaaaaggtgtttcttcacgctatgatgaacatagtgcacagtgctgtcctcttcgtcgatgaatgttagaccacaacaatcaccaatgaccttattcatgtcgttggggagcttttttcggtcaagagacatttgtccaggaaaaagacctaaaacctcctggtattccatcgctgtcaatggccgcttcatcacaccacaaaattggagaattttgaacgcgtcttttcccaaggttctctcccgtacacggctgagttttctgtcaaatatttcagataggccacgagggggatgcttcaatgcatctaagatgtcgctgtcactgccttgttcgcagagctcttcgatgaaaagacgcgtccagaggaacctttatcgatcagcctagatacttgcaacataaaagtccaacaactttcactcctaatgataaagaattcaccaggacttcatgcctagctcgattgataaagatggtggaaaacccctcatcccgtcgcttgaattggatcatttcatcacttacattccgttggatcccttttttagggtttcaaatatcttcacaatgagcgtgggatcccccaagatcaattgtttgtcttctaggcagttgcctatagccgcggcaatatagcgatccatctccaagtcaacttttgtctcggtcaccgggattttgtatttgggtttcatggctccaaacaattggttttcaagctccgggcggcctgtatagagaactttgaagtttttaacgcgcatgttacaaagtttggccacactctgcgccaccttccggatctcgacaggttcacattcatccagtccatcaatagctagatagtatgtattgtcatcgtggagccgagacagtacgaaatcaactacttcagccgtattgaggtcattgctatcctcgtataggcgttgtagactttcatcttcagcgtgtttgatctgagagtctaatatttgacgagcaagactcccgataatgtttctcgctgacagagatgcagtgttgtccgcacgacaaatgtaataggaaataatgtcattggtatttcgtgaggcatgaagttgggcaaccacattagatataagcactgtctttcccatacccatcgtgcctgggcaccagagaattgcagtattttggtcatcttgccaatcatggaaaaggaactcttgcagtagccactccgctgtggagggcacgcgttgttggatagcttgcttccagggtttgacgtagtcgatggtagaaagattttgtctaatgctagatctcaagcttgcagcttccctcttcatcatgtggattctccactggtgcgcctcagtgtgttccttttgggtttcttttcggaatttatttgtcaactttcgggatgctgcgttattttggctctcgttttccagcaatttttttgtttcctcgttagcctgctttgaggcaagtgatatctgcagctgtatgtcctttgtagcttgctttagtttatcgagagggcttttgaaatcagactcgaagggattgaaaatagacgataaagtttgcgtgatcggcgggcgtcttgatacttcgatgatcttggtacacaattggacgatggctgcatagtactcgcatagctcacgttgaaggctgatacagtcgggataaagttgaccaaattgttgataggttggacacgaccttccgatctccataatcatttttgtgaccttgtcgaagtaagatgtaatattgcttgccgtcaatatagccatcttaaccccccccccccccccggggggggggggggggggggggggtcccaaacgccccctccaaccccttccctcccctctctgcctcagctggcccctcctctcgccgtggccnnnnnnnnnnnnnnnnnnnnnnnnnnnnnnnnnnnnnnnnnnnnnnnnnnnnnnnnnnnnnnnnnnnnnnnnnnnnnnnnnnnnnnnnnnnnnnnnnnnnnnnnnnnnnnnnnnnnnnnnnnnnnnnnnnnnnnnnnnnnnnnnnnnnnnnnnnnnnnnnnnnnnnnnnnnnnnnnnnnnnnnnnnnnnnnnnnnnnnnnnnnnnnnnnnnnnnnnnnnnnnnnnnnnnnnnnnnnnnnnnnnnnnnnnnnnnnnnnnnnnnnnnnnnnnnnnnnnnnnnnnnnnnnnnnnnnnnnnnnnnnnnnnnnnnnnnnnnnnnnnnnnnnnnnnnnnnnnnnnnnnnnnnnnnnnnnnnnnnnnnnnnnnnnnnnnnnnnnnnnnnnnnnnnnnnnnnnnnnnnnnnnnnnnnnnnnnnnnnnnnnnnnnnnnnnngccccagattagggcggcgatttgaggattggagctgataaatgtacccacgacatcactgaactgttgtgtcgcctccagaaatgtacacaacctcggtgccacacatctccttgtcgtgctgttgttggcgtcgatctccgtcacgaatgcgatgacgctcgcaacgtctggtttcgtagcgctgactttatagagtcccctttgctcctccgtcagaataccctcgaattcaatcaacgcctcccggagagctgttgtcggatgcggcacccgtatcgaaccggaatgagacaatgctacacaagccatcatgtcctccgcggccgccttgatatcaaagaaattgcgatttgtcgaatttttggacaggggatgggagggttcggatcaaatctaaagatacgattcccctcagctgaagggggctgagggtggtaaaacgtctaagccacgttttgtcaggcaacaagctgaagagcggcacaatcttagcctaaagtatgggaagttctagccactccatacagtaacaagacacgatgtacatgtatcgcttggcgtaaagaattgtatagtacactcacccttctcacccccggtcgcgcgaccgtaaaacggcgctcatccatttctcacccgggcgacacccacccgactatcgactgcgtataagccacacgccgctgagttacctagttataagctcctcgcctacgtaaggatcacgttgcggggtgacagaccatcgcagaccaatcgcattagaaattcggaggctaagaatagtccggggtagtagttgggtgggtgaccaccagcgaatcctcactgttgtatgtttttgttttgctttttgaggtagagaatggccgtttttggcgtcaattctacaggtcctcatattctggtgtagactactgggaatctgggatattaatacttcgggtagtggattttcctcggcccggaccacgtgctttccccaaggtacatgcagtgatgcacagtacgtttgtgttttattttaagatgtttgagtgtttatattcgaatgcttggaaatggaatactggactgtttgaatagtattgattgtactacttcatctacttattcacggtaagcttaatccacaatgatcttcttcgacagctctgagtaatgcttgaagaagccagtgaacaaacgaatggcatgggcaacatcataagtaccacctgtttcacggatactgtgcatactgagctggggattgcctagatcaagtgtccgcgcgcccagcgcagcagacagcatagggccaatggtgctgccacagctcgagtcattacggaccacaaagagctgaagaggaacgtggacgccagtctccttggtggtcttgcgcgcaatctcctccaggagaacaattccaggagagttcgtcgcatagcgagcgttggcgttgatcttaatcaccaagcctttgttcatctccggcttatggtctgattcgtacttccccgaatagttcgggttgaccgaatgagccatgtcggcagagacaaggaaggaggtggacagagtctgctcgtaggcagttgacaggtcggtgctcttggaggaggaggatgggaggacggatagacggcgaatgatcgatggaagaatgttcgagtccgcaccctgtgctgtgcggcttccgatttcctcgtggtcaaacaaggcaatcaggcggatcgcttcctcgtcgtcgagggctgatttatcggccacggagtcaatcagaccaactgtagcacagaaagtgctgttcaggttgtctagacgaggggagaagatgaattcctccagcataccgccgagacaggacttttgagtgtcgaagaggatcatttcaaagtccagaatatcactgggactgacaccagcctcgttagcaataagctcaacgaagtgagagtggtgacgttctgtgacagatttcaatggtgagaataattccccacccttgtctgtatcaggggtgtcggctccatcattgcggttaagctctgcagcaataaggccagcgatagggaacagctgtgtttccttattgaatgaaaagttttcctggcggtccagatggatggccagtgttggaacacggaggactaccttgttagcaaggcacatttattgggtcaacatgaaacatactgggacggtcaatcttgaccagtttctgcacgatggatccatcgctttcgcgagtcataacccgcccagcgacaccgagatcacgatcgaaccctgcaggaaattagcgactatgatagtttgaaggtaatcaatggcacgtacaagtgtgccagatgcctccgccgtaggtctctacaccgacctggacgaagccttccccgctcttcttgctaacgggtttgaccctcaacaccggagagtcggtgtgggcaccgatcatagagatggcattgcccggctatattcattgacatgattaattgaaagaccatttacgcagttccgcaatttatacatacctgccattgcttgccgatcgcaaaagccacgagggtagtagtgttgcgagtcaagtagtacttgcctcccggttggcaggtcgacgcccaagagtctctttcctattgatggatgagccacaatttattactccggtattcagcttgagccgaccttgatttcttgaaagccagccttatccagaagctgtttcgcttcgtggacggcatggaaagctggagataagacaaatcagcgacattccacgtcatcgatagaactacatacgggtaggagcagcattgacaaaggtcaagaagtccagagcaggttgcttggcagccattgtagaataacgtcgagaacaaccaataatatcaggacaaagacgcctaaggaccattgcagggtgcacaaagggagagagttggcttttgccgccggaggttttaattggtttggcggtgactgcggccatgtcacgtaacaaagccaccagtgaaactagaagggagtcttagggccattgatattcaggtattcaggacatggtaggtttcaattattactatttgaacatggatatactattctttggtcgaccccactatgtaaattcctagaagtcaggcttggtatcgtcgttgccatggcccaagcttcgtcgcgtcgcgtcaaagcaagcgcgtatatcgaatcaataatctgtggatttcgcgttagtgaaacggtcaatatggagtacagatccctcacatcccccccactttaagtggtccagttagacggtgtgggcgcgtccctttctgtaaacaacaggactaacactgtggcatcagtctcgattggaacaaagccatgctgacacaggacgtttccaggaatctcggcaaacagcatgagacatagtctgggggagtaaacaaaagagatagactccactgctgaaataaattgtcgatcaaatatcaatgagcgtagtcaaaggcaaagacactggatggggccgattgccctcgctaaatcgggttagcgtacccgacgcgtgacctagagagtcgccctgcgcaactccgtcactcccttgaagacattcattcattcacatgccgacagtttagacgcttctgtgttcatttcctggtgaaagagggtttgatagtgctttatcccggaacttgtgccattttcaggtgttaacagccggggcaatcattccacctttggatcaacaacaacggaccctccgccaatcgcccttcaaatacccttgattctacacccgaatctctgaacgttcgacatccttgattcacagaacttcacttacatctcatgcaattcttatctctatcttgatcggctgcacttcgtctctggggctcgggcagacagctagggaacgccatggcggatagacctcagaatttaaacaaggccgggaataggtcggcaacaaaaccacaaaaatcgcaggtctcaaatatcgcatcaccacctggatcgaagacaccgccaagcatgccatcaaagcgcacgatgtattttccagacaattcaaatttggggaacggccaacggcaggatggagcagagccaatcgaccctagtgcgcttgcgaaagcattgaaggattatgagtctgctgggagccggcgggacaggaccccagcctccagtccgtgtcgcaagagacagcgggtctacggggatcggtaagccacacttttctccaatcagaaagctgcgccaaaacaatggcagtcatctgtgactcagctactgatcataattcagcttcattcccaatcgcgacgggcaagatctacaagcgacctatagtttattgcatgaagatggctgtccatctactccttccaagaccaagaaacgcccccctcactccgagcttcatttccaaaagagtgtgttacatctcggaacccaatgcgttgtacatttgacctgactttaaccgcagctgaggaagccaaccgtacattttcccgagttttgcgcagcgagctgttcggaaacacggtcccacagcctgacttgacctctgcgccatccgacccattgctcggcttcagcaatggaatcaatgacaagacccgatcccatacacctcccgctcatatcgcagccaatctccctcctgccagcatcaccccaaccaccccacacaaaaacctcttcaactatgggccttcacggcccggatcgggacacccaaccccctctaaaacccctcgaagtgtgcatggccctaacttagacgtgcgctccgagctctacagtctttcccctattcgatatgacagtcagcgtattctggaaacgcctcggaaacaggcccggtatgtgaacaaggtgccttacaaggtcttagatgcgccggatcttcaggatgatttctacttgaacctggtggactggggcagtagcaatgttctcggcgttggattggcaaactctgtctacatgtggaactctcataccggtggagttaccaggctgtgcgagctgaaagatgataccgtgaccagcgtgagctggattcaaagggtaagcaagaagtctgcatgttaacgctccacatatcatactcatacaggaaatatagggcacacatcttgcaattggtacaggtaaaggtctggtacaaatatgggatgctgagcattgccgacgactacgaaccatgattggacataccaaccgagttggcgctttggcgtggaacgatcacattctcacttcgggatctcgagaccgtctcatttatcaccgtgatgttcgttctccagatcagtatattcgaaagctcgctggccacaaacaagaagtttgtggtttgaagtggaacaccgaagatggccaattagcatccggcggcaacgacaacaaactgatggtctgggataagctgagcgagacacccctctaccgtttctctgaccacaatgctgcagtcaaggccattgcatggtctccgcatcaacatcatcttctcgcttctggcggtggtaccgctgaccgcacgatcaagttctggaacacacaaaccggctcaatgatcaaagaggtcgacactggtagccaggtctgcaacctatcttggtccaaaaactcagacgaaatcatcagcacacacggttacagccagaaccaaatcgtcatttggaaatacccgcgtatggaacaaatcgtctcgctgaccggtcacactttccgcgttctttacctcgccatgagccctgacggccagactgtcgtaacaggagcaggcgacgaaacactcagattctggaaaatattcgatagacgtgctacaagagacactcgtcgggaaggcagcaaactggccgaatggggcaccattcggtagttcgcaatcccctctatttctaatttgcctttgcatctgcattcgatatggcgttttgcggttcacttaatttggtcactgggggaaaatcattgcatggcctgcggggatctgactcttcgtctttttatgcgtcggcatctattgcatcttcttttctatcggtggtttagagcatttcaggtggacgtccggcgctcgttcattcggaatggggtaatgcttgtttgagttttttttttccttcaatttttctttgctttttctgttttttcttgccttttttgatctcttccatcggttccttccaactctggctgtgatttagcctagttatactagccagacgccttcgagtcaagcgaacaactttacatccacgtttcttgggctttgagcggcggcgcttgtggtgtttcctggttgctggtatgcggcgttgcgcggcgggtgttctcattgcaatttgtctttcgcagggttgcttttgatgatgagatgaccctctttttctccggcacgaatttgtgcctatgttcctatttcagaggatttagctatgccaaccggccttcatggggatatacaccatggaaatgagaatcaaacttgataatcacttacatgtttcttggaagtccaaggctgattcaactcaactaagaccaatttttattattgtggttcaattccctttctcaagtgaagtaacccaattaagaaaatatccgattaactatgctatactgtatacattcatgaatgagtctcgcttgcccagtttttggctcagcaacaaacaaaataaaaagctcaaaaagggagatttgaaacataaggaaatctaaagcaccaagcgcgccggctcaacagagagaagagtcttgattcgctccaagaatgccttcgcgcggacctcctcaccagcagggactgtcaagctgaaaacattagaagcaacacccgcgctctcaaccgaagctgcaggtgcagacttcttggacggcttggcactaaggaaaccgatcaggtcttcggtaacgggcttagagcggacagacttaggagcgtcgaaagcgttcaggtcgggaacgtaatcaccgcgtgatgtgttgatcggctcggcgccgagaatctcatcgaaaagctcgtcggcggagggcttagagttagctgggcgaggcaggtcgtcgttggcaaggtctgtagccacggcaaggaagcgggacagcggcactgtcacacccaggttatcttggagcttcttctgcgcagacagcacggcggccagggaaatggagatggccacagaagtcaaacgcggcggctcggccacaaccttcttttcgggcacggccggtgcggccggtgcggccggagccgcaatcttgatgttgctcagatcgaggtgggtaagcttggcaagtgtggcggcttggtttgacgggtagttcgcgggaatcttgccgatgtatgcaagcacgtcgcccttcaagagacgacccttggggccggaggctgggatcttggaaacatcggactcggggatgcccttctcacggaggagctgcgcgacggaggggtagagtggataggcgatattctgggttgtgacagaggtagattgcaggcctggagagtgaaatggatgacgccgttagcccatgtagtaatgcttgttatagcaaataagttccgccgtagcattgagctcagaggaccggctttccgttgcagagatgttgttcgccatgaacatggataggaaactcacgtctgccgacaccgaacaccttcggttgacgtcgagcgaacatggccggaacctgaccgactgtgatcctggctgccattgctatgtgattctgttttggaggattgggagtactgcggtgccgattggggtattcggccggtgtcgcaactcgccgcagacgctagatttggaatgaacgagcagaatcaacgaagagcccaccaccacgttgaagcgcacagatctccaagttcgatttaatttggggtcgtgtgtttggagagacaatccaaagtaaccgttggagctgtggagggcgttgggagctttcaccggcggccaagacgggaacctttttctgccgcctgctgttttggctgttatcggcgaatcccgatgagaacgacagttgaccgattctcgtcctagtaagttacagaatgaacctattcagtcgttgactattcgtccattttcccccggattcatagctgtcaattgactacgtgctatggccttaatcgctttactaacttgaacttccataggctcatcgcagccatgtccgtcagaccacccaccttctcaatattctggcgccaatgcctacaaagtccaatgcgacctggctttcagatgaactcgacatcttccttgcgctacttcaattctagtgcaccccattacaaggtcaagggtgtggccagaaccgtcgattccgcgtggcaggccgcaagtccttatgggaacaagaacccccgtgccctggcgaagctgcaagcgaaggtattaaaagccggacaagtgcttttattcaaggcgccttctcatcgcccatatgtcttgactgcgtatggtctgtccgcgttttgcttcgcctattccatctacaactcgaacgcggttctccgggatcccctggttcctattccgatgtggcagaaatctctatttggtggtatctgtatcatgatgagctttggaggcaccttgttcatcctccgaactggctccctagtcagaaatatcaaggcgatcaattccaatggtcgtatgcgcgtcctcttcacagtccgaagcttggttcctttcaagaagccttaccaggtcgaagtggcgccgggtgatctctctttcaagcgcagaatctctgtctctccggaaaccatgaagcattacgaggaaagtaccaaactcggacgtggattaaaaacggagccaaccttgttcacgaggctgcaatctatgcctcgtcgggttttccagagcgtgcggcaacttttcacaaacgaggacttcatcattgtgcaattggcggggcacaagacccatttccgactggactccaatggatacatctcagatgatctcctgcactttgggcgcatggtgaatgtgaagatgccattcagagattgatcgatgatcatatccaagtatcatacccagagggtcgcttcatgtgtcgtatctagttcagtttgtacatcattttggctctgtctcttagatggcgacaccctgtaacactagttaaaagcgcgatttcaatcgagaatccaacaatttatatcattagagtattgcctgtcagaaaacgttgtagcatgcaatgccgcatcactaaatttgggagccacgtgatggccccggcgcgtcctaggtggacgcggttcacccgctatcgcgcccctcacacatcttgcgcacaacttaatctctgcttaaataacagggttcttgaattctcggcgcgttgctccctcagggaagccgctggcaatatgggaaaactcattcgtttggagcttttcagtatgtaccgaccggaaggtgcgcaggcagttgctaactttgttactagacttcaagtcctacaagggacatcatgtcctcctattcggagatgcgtacttcacctcaattattggcccgaatgggtctggcaagtcaaactcgtgagtgcctcctcgcctcagtctaaaggacccaagctaacgcgcgttaggatggatgccatatctttcgttctaggaatcaagtcctctcacctgcgatcgagcaatctccgggatcttgtctaccgtggccgtgttttgcgcacgtctaaagtggacggagaacctgctgctgatggacaggatggcgaggaagaggaagggccagagagcatggatgtggagcaagatgccggtggaaacgacccaaagtccgcttgggtgatggcagtctatgaggatgatgcgggtgaggagcaacaatggcgccgatctattaccagccaaggtgtcagcgaataccgcatcaacaaccgaatcgtgtctgcccaccaatacaacgaggcattagaggaggagaacattctgatcaaagcgcgaaacttccttgtgttccagggtgatgttgaggcgatcgcatcccagtcgcccaaagaccttacccggttgattgagcaaatctctggcagtttggagtataaggtcgactatgaaaagttcaaggcggaggcggaggaggccgcagagcagcaaaccatccagctcaaccgtcgacgaggcatcaactccgaagtgaagcaataccaggaacagaagcgagaggctgagaactacgcgaaaaaggccgaagaacgcgaccaggccattatcactcatatcctgtggaagctgttccacttccagcggttgatcgacgactccagtgctgatatccagaaataccaaaatgagctcaaagaataccgccgtggcgttgagaaatatgataagaacgtcgaggatgccaagaaggaccatgctcgagtcggcagagatgttggcaaggctgagaaaaacatcacaaaaaaggagagggagattgaagaactcaacaactcacttgtgcctgtggatgagaagatcgacatcaccctgaagaaggttgagagatacgcgtcaaagattactgagatcgaaaaggagcgcacatcacaatccaacaatggcaagcaactagaaaaggacctcaagcttgtcgaaaaagctcagacccaatgggaagttgaatggcagaagaccatgagcaagaagggtggccagctgagcgaagccgatcagcaggagtaccgtaaactcagagaagaagtgaaccgacgttcatcggcggactcgttgaaccttgacaatctgcgacggcagagaaagaccgaagctgaagcagtcaatagcttgaagggcaagtttgagaacactgaatggcaactgaagtcagttgaatccgatgtccagaacatgaacgaacgcaaggcgtctctcaataacaccgtcaagtccacatccaaagagatcgagcataagaagaaggagttgaacgccttgacttccgagcgtttgaaggtctcgcaagtgcgaactgagctcgaggaaaagcttcaggtcgtgttaaggaaacttctcgaggctgatgatggtaagaagcagactgaacgcgaactccgcgccaaggagttgatctcggccttgaagcgcatcttccccggtgtcaaaggccgtgtcagtgatctttgccggccgaagcagaagaaatactccgatgcagtcagcaccgtactaggtcgacactttgacgccattgttgttgataacgagaagaccgcgaaggagtgcattcagcacctacgcgaccaacgcgcaggtcaggccacgttcattcctctggaaactattcaagtcaaggcgttcaactcgaacctgaagggcatgcatcggggcatgcgccctgccattgagactattgactatgatgattcagttgcacgagcaattagttacgcgtgcggcaactctattgtttgtgacgatctggcgacggccaagtacctttgctacgaaagaaatgtggatgcgaaggctgtcaccctcgatggaactgtcatccacaagggtggcctcatgactggtggacgtggtcctcagcagcagaactccaagcgctgggaagattccgaggtcgagaacctatataaattaaaggagaagctcatgggcgatctcgcgaccctccctaagagtcaccgccgaggctctgaggaagagaccctgcagggcgagctcgtcggtctcgagcagcgcctcatttactctcgtgatgagttgaaggctcttgaaaggaacctcgagagcaagcttagcgagctggacttcgttaagcgccagatggaagaactgcgacccaaatacaccgagcgcaaggaaaaccttgatgagctagatgagacaatcgaaacgtcacaagcttcagttagcactgtcgaggatgagatttaccgcagtttctgcaagcgcctagggtatgatgatattcgagaatatgaagcccagcagggctctatgcaggaagaggccgcacaaaaaaagcttgagttcaccacccagaagagccgaatcgagaaccagctcagctttgagaagcagcgtatccaagcaaccgaggaccgaatcaacggccttaaggcccaatacgagcgtgatcagggcctgattgaagagctacaaagccagcaagaaggaatccgcaaccagctcgatgagttcgaagcggaacttgaactcctccgagaggccctcgagaagcaaaaggaaatctatggacaagcagcagaaaacttggcagagcagcgtcgtgaactccagaagcgtagcaagcacgttgaatcagcgttaaagaatgttaatgcacttgaagcagacattcagagaaactcttccagtcgttacactcttttgcgccgctgcaagcttgaagacattgatattcctttgaccgagtcttccaattcccttgacaagcttccaattgatgaccttgtgcaagcagcagaccctgatgccatggaggtggatgaaggagatggtttggacgagactgcccaggtgcatgattacggtatcgagatcgactttgattctctgggtgagaccctgaaagaggtttgttctcctatccattgcttatttgtcacatactaattcaattccaggaggccgatgacaagctcgaggatgaactgctcgacaaggtccgtgttctcaacagtgaccttgacaagatggcaccgaatgctcgtgccatggagcgcctggagagtgtcgagaacaaacttcgcagcaccgaaaaagatttcgacgacgcccgaaagtctgcacgaaaggccaaggaagagtttgagtccgtgatgaagctgcgatccgacctcttcaacaaggcattcacccatatttctgagcagatcgggcccatttaccgtgaactcacgcgcagtcccaattaccccctgggtggtcaagcgtaggtttcctcaactcccgactttgaataatcgctaacatctcaaagctacctcgatattgaggactcggacgagccatacctggacggcatcaaataccacgccatgccccctcttaaacgtttccgagacatggaacatctctccggtggcgagaagaccatggccgcactcgctctgctattcgccattcactcataccagccgtctccattcttcgtactggacgaggtcgacgcagccctggacaacaccaacgtcgcccgcatcgccaactatatccacgaccacgcctcgccgggcatgcagtttatcgtgattagtctgaaaaccggactgttccagaacagcgaggctctggtcggtatctaccgggaccaggtcgagaacagcagcaaatcgttgacgcttgatgtgagttttaatgtggttcgtatgcgatatggaaatatgctgacaatgattgttccagcttcggaagtacacctagatcggtggtatttatgcggattgtgtgatgaccctttgcttttgctttgcttatttcttcatctttgtagattattgagtcttgctggtttgttttcttcttctatcagtgtcgatcataggagtaggaagcccagtgtctattctgagcacttattcctatcggcaaggctgttaattgataccagttcctgtactgtgtttttcaagtcgttccaatctttctcatacgtcgtacctgcggatagccctaaaaatatccgtttccgaacacttaggtgccgactgttcatacttctacggattccagaaagtggctcgtagaggacttctcgaaagtagatatgaatagattcaattaactccatctaactagatgtgttaaggccaccatgttgaaaacctcctagaagatgctcatggcaaaagataggagagagataccaaggcctcgcaaaaaaatagcaaaaaactgaccacctgtaaaaccacgaaccgactgacttccaccatgtagagaggcacttgttgaaagcaccggcgtgggaagagacaaatcgaagtctcaaaagaagaaaaccgagaagaacaaaaccaagattgagaaccgtgaaccgaaaagacttttcatccgcgagacttgcgacctattggagggaccaccatagcgagaggcaggtagtcatcgaggcctgataagtcagatgccaactagtttgtcgctgtctgtgccacaacctcaatttccttcgcaggcttcaccttgggagtgatcttcatcccagaaacagccttggctagaatagcagccttggcctgggcagcactctttacctgggcggcattcttggcttgggcggcactcttgaattcagcagcagacttaacctgggaagcagtcttggaaggagtagcagtcttgaccccagcagcaggcttaaccggagtagcactcttggccttagcagcagccttggctagaagagcagccttgacctcaggagtgatcttaaccggaggagtagccttggcctgggggataactttggcctggggagtaactttagccttggttccattggcggtggtatgcttggtctgagaagtagtagagtcgacctgagttgctgtcttggtctgaggaatggcctcgggctcagtgacgggctcggcttcggtgggcgtcttaatcccgctggtatcagtgagatcctcggaggacgactcaatatccacgccagaggcacgaacagtctcaggagtagcattaggggaagcttccgaaccagtggtctcggcgacagagacaggcggagacgggttggcttgttcgccctcgccaagtggcttggggacatggttcgggatgctcatgagaatgttgttcacggcatcagggtttttgtgaatgtggaccgtgtgcttgagcttgtccttgaccttgaagtcacagggaatgagacggtaggggagctcctggtcgcgatggtactcgtagagccggactttgtagccacggatgaggatggcccagcatcgttcatctggaagaggggcactgagaagtcggggaacgaactgatcccagtctgcctggactgaaacagaggtgtcgaggacgaccttcacgatggtgtgcagggatctttcatcgccagaggctttcacgacgaagcagttggagtggttattctcctcgtcctcttgccacttgaggacccagccatcgttcgaatcgaaggcgtaagtaaggagagcgctgaccatgatcttgacattctcagcggttgggttagcctcgtaggcgttgatgaattcagcaatagcaggaagcgagagatagtttgtggtctccatgattacgaagttgaaaagcgttgctggtgagcagagattgatgaacctggagaggaaggaagtcgcaggaaggaagtggcaaggactgaggtggaaatgcttaaggtcttggaatcgcaagcgagatcaggaaactgcacgtaacgtgaaagtgggaaagtgtgcgtagaagagtgaattgaggcaaacatttatacttgtagggttagttctacctaccctataaacgcgtgtttgatcaaagaaggcgaattatcaaagcaaacattagtctcccacttgctactgatctgtataacttcatatgtttctatatgtactattacaagtaacatagaactgtgagctaagtgaaaggtcgccgtctacgtccatagatatatatctagatctagtgttagtctgccaatgactccatattctgagcattcaccaggacacaagcagactgaaaagcaaatgaaaggaagccaagagtaagccaggaggaaatatatactgagtagacaggatgatgtctgctgggtccttcctatctgggctgtcgtcgcttccatgggctcggactgagatgacttcagggcttagtaagttgaatgtctactgagtgcactcaggcaaagtgtgcgctacaatagatctcaatacaacaaattattatcttctattgttcaaagtctgctcattgactcattttgtcatctcaccaggccaagcagaatcgtctctgactaccaggttcaagctcggctcatcccaaaataagttacatgagcttcattcacatgtcctctctgggcctcgtagctctagacctcatttgatcaatactagagaggagcaaagatcatacctgaggccagactcaacagaatctgcatatcctcctcactagtctctgactttgtaggtacatggagtggccaagcccaccatcaagctctgagcgactgattctggcgggggatttccgaccgaataagttctcaagaactggtgatcaccaaggcgtgagataccatatgcggattggagacaattgcaggatgtcctgaaagtaatcacagagctgcatatactgcacactcacatatgtacagcgacatgatctatacgatcaggtccgaaggcatccatgactgaatggcgtgcctagtacaaatgacaccgtacgttggaagcatggatgagattcccgttatggcttcctgcctgagaaatccgcaaggcgggatagtggctgactggggcaccggaaacgaaccgatcgcctattattgctcggactcttagccatcagggtgagactactgacattgccttgttcgtatacgaatcggagaatggcaagcccgtgcgacaaagcgatgtcacgattggcaaatactcgggagtcaagggcttaaaattgagaatcctgatcaagttgataggagaagcgacccgctctcgattttgggtgtgttctatcgagtcatgggccccagggtaactggaaagcttgagggccgttcgtatcgagccctacccctgtacctgggttgagaccagcagttcgcaagtgataaagtactggaatcctgccctatacctccagcgacactgtgactggtcagcgtgctgaaccccgactttgtatagtcggctgcatctgcacagacactccttatctatcctccacgctcgaagcggttctaggctctcccttgacaacttaatggagcgctttacacagacggaatccgtgcccactaaggataaaaccaagcttcgacggggtatcgagccaatagctctaatcgcctctccctgggaacccgacgccaagaacggtgagacgaacaacggggtcatcgggtgcagtctacttgggtatagtcaacgccaccggccaaggaactgtgagcccatgttccaagttgcaaatcatgcccagtgtcaacgccccggacacacggagacgacctgagtgagagttccaataatgcaagtctcctgcaccgataccctgctaccgggatttgggcatctgcacccagctagcaatggaaatgggaagtcagcgggagcttcgggtgcattacccgagatttgtgcttgagaacattgcgcaatataagtatactacagcagcgacactcgatattcggttatcgagaaaaaaatatagtgaatatgcaatcgatcgtggtgtaacggtagcagtacatatatattgtgggaacagctggcgtccacgggcggatggatctgctatgcgcataatgtggctattataggggatacattgtacagaataatacacacagcgcacaacagtagagtcgctcgtattgtactgtacgttggatgtcgtatatcgcgccgatcatttcgtctgcggcccgcacataggcaaggggcgcatgtcttttgcacactgaccattcgattctcgtgtggggagtgttgggtgttaccgagttggggccaatgcggctcagaagggaaaaccccgtgtcactgattgcgtggaagtattttgctttttcccatgaggctgcctggcaaacggctggatattcgattctcaagccatcggatgcgtaccaaagacagaaagtataaaaggcggatacctgctgtccctgtcttcaacgggattacagtatactagtccaatgtcacgatcaacccgatctctcgcactataaagtgaaacagtaccgttatattaacagcacggaatatgcggcccgaggcccatcggcgagcatcaaagggcgacggctatattttccgcatttgtaggtggagtcgagcaataagagcgccctaaaaagcaaacacgaacaaaaacaagaaacagacggtggggaagacgaagggaagatcctagctaatcatagccatttccaataattgctggtcgtatacggaaaaagaaacaatgccatgatagttacgcagtagagtgatcaaatccgcaatgatcagcttctttcccgtcctgtcgacactgtcgatccgggagcagggaaccgatcccaatggtagttgactctttcttcttctggataggatggagtccggatacgacaatatcggtgggaatgcttctctagctccgggttgcgacgtccgcgtatgcacgatgccgaacaggagttgaatctgaagactcataatgtgtatttgtagaaaaagaaagaagagaaaaagaaagaagccatcacgaaaataaaaaagaaacaaggttgaccaggataccgtcgggcctggcatccgcgcgtccggaagcagaaaccgacttccgcggacttgaaaataagctcaagattcgatggtcgcgtttaccctcgtatacgaagacattcatggacccctgttgtacatagattaggttgaagggcacggacaatggtggaccaagcgcggtggagatggacattggactgacaggaggaagcgaagagaaggaaagaaagggaagcaatctgcggcgcagctgatgtacggagtagtcgagcgtatccataggagatccatcacgaaggagagattcacctagacccattagtcagtgctttattagcctctcttggcttgcaggagatgatctcagaggcgtccaggatgaccgctcttctttatcacttgtcctgcccagggatcgccgatcggttgatacgattggatggtgatttattgattactctatgtctgcatgtattatttctgattctgataattgggctagagagaagtggtgtatcagacgggaagtatttcagaaatggattgctgcagatggctaagacatcgttagggcagttagggcaagctaagaagttaggtaaatcatttaattgaataatcaaatgatttaaaatagaaattgagacgtccagaggtgtgggccgatctcggatcccccgacagaaccatggatcgaacaaggttatgtgacactcatccatggctcacagccctaagtgtcagtgcgcagaacggactcgacccatcgactacacatcgcaaaggggcagacgcagatgggccaatcacagccgccacaccgaagtgatacggaggctgccctattgccacacgctcgctttcgcagctattcctttttccttgcattagctccacgccgattcgtgcgttcaggagacgtcggggtggagatatgccaatcctcggggtttggcgtcggaaatgggagatcatggatagcccgtattggacttacttggtatatttatctccccttggaccctgcccctgatcgaatggtcccggacttcttatccatcggcaagctgtgttgactcttctattaattgacaccgtggattgctgggcattctgtatatctgtgcacgttaccttgaaaagcgcagcctgacctggattcgacttcaaccgtactatctgattctcaccatggatatgaatcgatatccagttcccgaagaggtcttggagagaagacactctgatacgtgcatcccacaccagcatatgaacatggtaatagaactattgcaaaccaaggcacatcagtgggctaacaaccaatagccgatcactcctaaacagccccataccgaatatacacacccacacttcgccatgatatacctcgaccacaacggtcaatggcaactacaagcctcgccctcaattgcaggctgcgaaggcgccatcttcactcaagatgttacagaccgattcatagaaatgactggccagacgccccaaaccagtccgcagttcccaagtgagtcagattccatccaagttccagaacgacgctgacatcctctccttgcagacccgacccaagcaccccactccccttgggacgagcaacctgcttcgggatgggccccgcctcaggcgcgacaggccgagatgatcccgttccaatggtcatcacagcaaagccgaaaaaagtcgaggcgtgccggcggtacgcccaagtctcgaccgaaatctacctcgccgccgcctgtcgctccggctcccgggcggacggtccttcgtgtcgggaaccgggcgctgctgcgacggtactatgagaaggcatttgaggatttccagcagctcaactgccgggcgattgcgaaatcctatattaagcttgtcgagccgaggaagcaggtccactacccgtataacgggcgcagggtgattgccggtgtctcgcagcgtgttgacccggagttcacgaagcctgcgtggtggcctgctggtgtcttgcacaaagagcctgatcatctgctcaaacctggtgagcatatcctagtatcacgatatgaaccagattaatactgactgaccatagatcgtctgcgacttctggttcatatcctctgtgaactaaaggatagccacggagtcacaacggataagctgcgagaagctggccaagacgtcagacggcagatcacacctgcccaccggctgcaggttctcgacgagatctactttgtgcgccaaatggaagaacaatatctggatggtgaaatcggtatgtatccctatcccggcaagattcaatctacagttcactgacatgtactatagacgccagcaccttgattcagataacacagacacatctacccgaagcaatcttcccagacgatgacctatcatctcgtgcacacgcagcacccgtaacagccccttccatcgaggccgaacataacatgcacgacgcccgcgacaaccctgttatctccacgctggaagacgatgacccaaagctgcaccactcgcatagtctgcccctatcacccactactagcgagtccagtggtccacacagcccaactggcagtttcggctacccaatagccatagcaccctccgtgcatgtaataccccctctcgagtcccccaatgtcacaaagtctatacatccagacccgagttatctgtcggggtactactcgcagcaattcgtgtctgataaagcgcctgggttttggccacatgccaatactgcctcgcagtatggctattgatgttctgtttctcttgttttccagtacataactggagtttgagcgtttggctggacacggatcttgggtttcattggttacttttccatatatatattttcttaggatggtttgttaattagcttccatatacgagaagtcagggagaatgcaaattaatggacaacctgatctctcgtagagtcgaccttatgaattagctgcctcaggagtcaggcgacacctgggccaagacggctcgctgattgggtccgcgtgacgatcccctagcgcagctcctccatccaaccaccactcacatcgccagcacacgtcaattcctcaccttctcgctggctcttgactgtgtgtttctccaaccttttggcctgcaccaaagcatcagaagccctacatcgccgtttccgtgccatgcgccagtaagcccgcagttgtttacttcttggatcgccaaccacagtccgccatccgcgccctccgactccaacacacgcgtgatctaccgataaggtaactttgccgtctctttggatgattacccctcatatctatataatggccgtgtcgttcggcacttgtgtctgtttggcacatctaaaaagtgcttttgaagcttgcaactatggggatgctaactttcaatcggttcctcagtcgaccgtatcccaacacccgggacggaccgacaatactctgcttccagcaacagtttctaatggaaagcaccggctcgaggagaaaatccgataccatgtcggccgagcctccggtctccacgccagtcgtggaggatgtgtcttcagatgactccgacaacgatgaatccgactctcctgccataaccccaggaaccctgtcgcgcaacggctccttctcaaacagcagctcgtacctagaagactgggagtcatttccaccgctggacaagctgactattttcgacctcctcgacaacatccacctctcacagcgtctggagacttggcagcagaccctcgccgcgcaaagggagaaggtgcgcaagcagcgggagaagctgaggttgtcgtccttgaatgccaaggaccgtgttatgggtgaatggaagcgccatgcaccgaccgccgaggagaagctggagaaatatcgtgctcggatgaagcatggcgttgagcgtctcggcaagcggtggagccagacggcgactgtcaccctccgggagaagatgtcgtttattgctggtgtgctcaatatcttcatcagcggctacctgatcggtgcttgcccggagtacttttactactggtttagcggccagctggcttttttcatgcccatccgctactttacataccatgctaaaggctaccactacttcttggccgatctctgctactttgtcaatttgctctgcatgctgagtatttgggtcttcccgaactcgaaacggcttttcattagcacgttctgcttgactttcggaaacaatgcggttgcaatcgccatgtggcggaactcgatggtgttccacagtatggacaaggtcgtcaggtacgttacacatcgaaaggaacaagttcatcgctcatcttatctagtctcttcatccatattatgccacccgtgactctgcactgcatcgtacacctgactccggttgcgatactcaaggaacgcttccctgctgtctacgacatcaagttcagtaagcccggggacccagagcattatggtcttggtgccatgatcctctggtccacggccccctatgtggtgtggcagctcatgtaccacttcctgattaccgtgcgccgccgcgaccaaatcgcagcgggtcgtccgaccagcttcacctggctgcgcaagtcatactccaaagcgtggattgggcggtttgtgctgagtctacccgagacgctgcaagagccatgctttatggtgatccagtacgcgtacgctttgtccaccatgctcccctgtccgatctggttctggtacaaatgggccagcggtctgttcatgtctgcgctattcgtctggagcatccacaatggagcgacctactacatcgacgtctttggaaggcgcttccaaaaggagctggaacagcttaggacagatatggctcgttggcagaactctcccgaaggatcaactagtcctatccttatccctgagcccagccctctcagtgaagccatcaatgcacacagcgaggagaagcgatctagcgttgatcgaatccctttgttggaaactgccgatgtctcctctactgatataccggagaaagacaacaaggattctgttgttcgagagcgaatttgaacattacgagataccatgttgacatcgttatgccagtctttatataccctttgttggttcttgtcaagattcatgagcctgaattgagcgagtcggtttatagatgtacacgttattagattgaatgaatgttatgaaaatacttctccgtcggtccgttctcgaactgtccgggatctctttaaccccgagcaaaacccgaggcggtctcggccgtcacgtgccagatgactgcggcagtacatcacaacatctcgtcggatccggttccaggacattccaaacttgtgaccgacattttattactgagattttttttttggatcatcctctggacattaagattaatcattaatttcattattgttgccctataaaccccctgttcgctcgttgcttcgtgcaccaactttttcaccgtttcccgcaaatgtccgctacaatgagatcaaccggattagtccgcggaacacctgctttccggtctgcactaatcggtaagtgacgagtccagaaataaatggaaatgccagttgctgatacttcccagcaggccgtagtcgttccagtgcattgagcccggcctccattgcagcccgcagccttctacgaaatggccgcgatctgccatcccagatctcggccctggccatcctgatcccgcagcgtggatatgcgaccgagccaacccagtccaccaactctcctcagaactaccctccccccgggttcaatgccgagcaggccaagaagccgctcccccaggaacagaccacgcagccacaatcgacggtggcgaagacccccgagacacaggcggctgctaagccggctgcctctggagaggttgcgaagacgagcgtggaggagcagaagttggctgagaagaagagcgcgaaaaagttgacgtttggacagaaggtcaagaaggagttgcagcattactgggatggtacgaagttgctttccacggaggttaagattagttcgaggctggcgttgaagatggccggtggttatgagctgagtcgtcgagagcaccgccaggtatgcgccactacaatatttcgatttgacgattggctaactgagtttgattagctccaacgtactacaaaggatctgggacgtttggttccgttttcgatgttcctcatcgtaccatttgccgaactcctcctccccgtcgccttgaagctcttccccaacatgctccccagcacatacgaggggcagaaggcccgtgatgccaaggcattgaacctcagatcgacccgcaaagaagtttcggcatttctacgcaacaccattggcgagactggtctgcctttgaccgcagccactgtcaagaaccacgaattcacagacttcttccgcaagattcgcaccaccggcgaatcgccctcgaccgaggatgtcatcaaggtgtgcaagatcttcaaggacgatctgacccttgacaacttgtcccgaccccagctggtcggcatttgccgttacatgaacctgaactctttcggtaccgacgccatgctccgatacactattcgccaccgtatgcgccagatcaagcgtgacgaccgcgcgatcttctacgagggcgttgattccctctccgtccccgaactgcagatggccggcgcctcgcgcggtatccgcacacacggtgtctcccccgcgcgcctgcgcgaggatctcaccatgtggctcgagctgcgtctcaagcagggtgtcccctcgactctgctggtcttgagtaacgcctacctatacacacagggcaaggagaccgagttctcgtcgcaagtcgacgcgctcaagtctgtgctctctagtattcccgaggagctgttccacgagatcgaactcgaggtgcacaatgccgagggcgctgctaccaacaagcagcgtctggaggttatcaaggagcaggaggagctgatctcggaggagaacgagcaaaacagcaagaatgaggtcaagggcgtttccgtgcctaaggataccgaggatatcgacgagaaggaggagactaaggtccagcctccggtcgatggtgataagcagtctgctgaggccaaggatgctttagcggagggtgagcgcgccgagaagacctcggaggccaaggatgcgaagaagagcgaaagcgtgtagttatattgtttgatttatcttggattgtacttgtcatatagatttcctttactttggccctcatttggttttcttcccttcggttctctcctgtgttatttatttcgtgttgatagaccatttgatccccgcctctcccttattatgttcctgtatactctattgactcccatatctctaatacaactacatccgtggataaatcaaccgtaacacttgaagtactctccggatttatatcattagtcaccgacattccaaattacctcggctacaaaccccatcttcccagtatacaacctggccacggagtactccgtccatatctcggtccaacaaacccatttgaaatgctctcacgaccacagcgcaaccttctccaaagacttcgtttcagccacgcttaccaaagcccaacccaaaaccagcccaaatcatccatgcactccaaccccaaccccaaccccgaaccccgagcatccaaaataatgccgcccctaaatccaacctcgcaggtatgtgtaacttgttctctgcagctacccgaaaggaccgcgtgtcctgtgggattccgaatctgaatctgctgtatccattttgccatgcgcccctacgatcatgtatccctgcgggtgttccccctgcttcttttccccctgagccacggggggtgtgtcttaaattgccatgtttcttttctttttttttcctgcgacgatcatacctggatgtgttattatccagggagcggttcggtctcggggctatgggcgtttgagtttcggcttccagtcttacgtgtgttgggacctgtttgaattaggcaggagatgagatgagatgagatgagatggaatattcttttctttgattgtctgagacaaggttcttcacggtccagccgagacttgaccgttcgatttctttttccccgtggatggacatcccgatgttaaacgcaaccacagtatagaaaggaggaaagaaggaatgctgatatttacttgcacatgtatcaggaggcaatcgccaaacttcgaaattacatccctccgccaacaacgtactactcggtcccggtaagcagacgggcggcagtgctgctactgctcttcgccgacgccaagggcgatcttagggtggtggttacgatccgggctaagacactaagttcgtgtgagtgaccagaacttagaaaatacgtggatcagccctgttcccaggctgcatgacatgggttggttgttcgggactaggctaatgatattcgggtctacggagtagacgcgggagatgctgcattgccaggtggtaagtttgacagctccagactctgcaaggcaaaggcaaaagagaaaggaataaaaaaaagaataaattcctcgcttaaaataaactaaccccttcttcaccggagtaggccgagcagaaaatacagaatccgccttccaaacggcgcggcgcgaggcatgtgaggagatcggcctccccgacattcaggaaagggaaaagcttccacccccgttcagcgtggagcatctctgcgagttcccggcaaatcttgcccgaacggaggtggtggttcgtccctgcgttgcgctcctccacagttatgatgcgggcttggggctgaattctaatcctgaggtgtcacttattcctattctggacacgagagaggttgaggttgtttttacggcgccgttccaggactttctgcgcggacatggagagaatggggaggactggtatcgtgggtcttgggggatgtggcataattcgcaatggagaagtaagtggcctccccctatgttgatgtatgtgttgtgtctgttttgtgtgtgggattgccaagtggaggacgtcccaaataggaaatagcctggagactaactacgccactagtgcatcagttctttgttcccagagcagaccaagtctaccgtatctttggcatgactgcacgcattatcgtcgacgcagcccgggtcgcatacgcgcaggaaccggaattcgaacataacagtcattttggcgacgaggccatgatcgccgacctgcgccagttgggccggttaggtgaaaaggccaaagtttaggagaaggactgtgcagatagacatgccaataagaagtatataaataagacggccaatcagacgagggcgtaagcggatcaagggcgatcaagtccttgcgtcagttcgtttgacgatgtctgtttgttaataagattaggcgttaagggtctgttagttataagccctgatctctccttgcatcggatatcattcataacttcactcttcgtctttctttgttacacctacttatttccatttctttgatgcgtatttgattgttcgacattcgacatttccaaatgccaaccttgtacacccgaatggctccccccgttcgaccatctcgctcactcgaaggactcgagcgagtaatcccaccactgtcaccccaacctcccttctcaaatcgctccgatctcttcctcaacaaacccctccccgcaaaacccctggacccagaatgttcggcgatgtggagtgactccgacagcgacaccgaaagcaccctcgacagcatcaccagcgaaccccgccactccgcagacagctatcccatcggcatcttcgtcagttccggctccgactttgacgacttgggcgatcacccgcctccaggcgatcagctcctgagactatccccacagcctccacataaacgcacggactcgatcgatatcaatatccccgagccgtcggtctcagtatcgtcttcgttttcgtcccagtacggacggccctcgaactggagccagaaccgcacgggcacgaaccattacttccgcgagaaaaagtgggattatttcccggaactcgcgccctccactgtccaagcaagtggccgcatcagcccaaacatgaacaataaatcccgcaaaatcggaaacccgctggaattcgccaagggcaagtaccgctggcactcgctcgaccgcggcggtctcgtcggagtgcgtgactcgatcaagacgtacgtgcaccgcactctctcgcgcgactcgacagagaataaaccaaaggaaattacccgtccggcgacggcgcctatggaccaccatcttaatgatgtaggcggtgcgctcggtaacacaccgcagcaatctactttagctttggttttggacacgcaggccgcgctgcgagccccgtccgtcgcaacgtccagcagcagcgactacgactataccaaccacagattccatcttcagacaccgacctcgcctacttcgctttcatccccgacaacgccacggcagaaacagctcgccgtgccgctatccgcgtaccagaaacacgggcccgtgatctgggaagcgcccaagaagactaagaagcgcaatgttcagttcccgagatacaagtccccgcctggatccgtggcagagccttcttcgtcttcggctcccgatttgtcttactctaatgctacgctggcttcgcggaagtcgcagaacaatacccggggcgtgttcctgaaacgaattggggagtccaaggatgatcgcaggagggagcagttgaaggcgcagatcaagttggttgggcctgttaatccgcatacttatgtgcaggctgatccatgggtttgattgtgtttcttgttttgtttttgttcttcagcactactctcatgacttctcacgacatctatacctatctataccctcttcacttatgtctttgttcttgtttttactgcatattctgtcttgttctgtggcttcagttgtaccttgttattattagattttctaaatatttccaaacaagtacttctagctcaacttggtgtaagccatgactcttggaaatcagtttcaatcataccattccacctcatttagatactcaactgcgtcgtaaactcaataatcaattaaacttctctgcacaacacctaatcacctctacagacgctagtttcttacatgcacatccataccgcacaggtgcatacagccaacaaaccaacgtagatcgccactgtcaggcaactccagtcatatttgagatacacccgccttgacaccactctactccgcacttagtcaaagccacgtctgccattatccttgtattatatattccaattggttcatctcagggcaagggttcctactgcctgcaatgcaatccaagaaattaaattaaatgaggggtaaaccagggcctgaactctcttaccaactcgcactgagatatttcctgagtgtaaccaaccctcgtgttggcaagcagttctccgcacaactagcggtgggtgtgtagatgagctgttcgttggggaatagccctatcattattattgtgcggaatgtggatgtccactatatcgggtgtcatcaccgacttttagaattgtaagttgctcggcctaattactctaaggggagttgggccggtctattgtagaaaccaattaatgagaataatactgaataatatccatgctgtaggacatgagatacgttgatcaaccccactttgcatttgggctaagcgttgggctggctatgtacttcgctacatgaagaaacgaaggatatgtgcgtatccgagctgtcgtcgggtcggtgatgggtcggaattcgacgaagatctagatgtcggatcggatgtgttgactttgtgttcatcttggcttggacaggtcgaccttctcaagttctatgttccaaggttaatatggtggcttactgtgggtatccttggaataataagatcgcacctatctcaattctagaagcgacttgtatctatcatgacgaggtcgctcatcccgatctgtattttggcctctgtggcggtatgctggtagaaagggccgctagcagagtctagagctatgagcattccatggtgacgatttgatatagtttagggctttgtggatggtcgctatcaggattaacagtcagcttctatacttcacggtatagaacttggataacctgaatatcaagttggttaacactgttctatcgcttgtataatcagatttccagaacaatggcttttttcagccgcaaactaatgtacaaactactttttcattgttattgcggtcactttcaacaggacgtcaagactagaagacagaggataatcatggaagtaattcaatgtgccatctcttgtatccatattctagtccggagtcagacaaactataccacagcgactcattcatccaacatacaaagggttttacaccaattacaatcaactgatgactgcacatagactcaagatctccacttgaggcaacaatgagatccctccaagcggagtcgccgctgacctaaggtgcggccccgttttcttctagtatacgtggacctcatacacggcgacctagtatacggcgacctaatatacagcgacctagtatacgcggaccaacctgggtatataagtcggagacttccccacgtcagacgatctttctaccaacctacaccgctgcagtcatccctgactgcagtcaatgtcagacatggtgacatgtcctgaccatggaaaggacctgtgaaggtctcttcatgtggaatctcaggcattgcctggacttgggcttgttctttttgatgtgcctttcccggtaagtgaaatatgctttgttctctcttgttgtgtcagtcgctaatatgtatatgggtaggccactgagaattttggtcgctcgtctcaagggcgatattgatgagtcctttgaaatgacggggcagatgaagagcgtcctgaccatggaaaggacctgtgaaaaggtctattcatgtggaatctcaggcattgcctgaacttggccttgctctctttgatgtgctttcccggtatgcactatgctttttctctcttgttgtgtcagtcgctaataggtatacgggtaggtcacctttgagattttttggatgctcatccaaagggtgatatcgacgagcagttcgcaacgatggggcagatgatgagtgtcctgaccctcggaaatgacctgtaaaggtctactcatgaggaatctctggcatggtgccctggttttgcgtgttttgtttttgatgtgccttgcctggtacgtgaactatactttctctcttgatgtgtgtgtcgctaatgggtatacgggcaggtcctttctaagagccatttaacactctcccaaagggtgatatcacccagagcattttgccatgacggagcctgtgctggaacaatttcaggcaccggcttaatgatcgagtgactgtctaaagctcatcaaatccgtgcactcggatacaatgagaacctcgggcagactggtttgatgtcgtcgaaaagataaagcatctatcgacatagaaaacgacggatgagacctcttggtcagtggtggagcatgtgggtcgatgagcgtgagtaactcgagatacacttgtcaggtcgtggaaagatccctatactaaccaaaagtctagtccgcaatgcgagcttctcgtgcgtttccctgcaagggacgctcaagaaggtcccggtcgattgtgttggagtttatcaagctgccgcaaggccttcgcttgctcttctgccctacagaagatttcttgtcttggattcgaaatgtctccaagaccaaaggcaaaggcaagatggccggggggggggagaacggagggcgttgatagggtgggggttggnnnnnnnnnnnnnnnnnnnnnnnnnnnnnnnnnnnnnnnnnnnnnnnnnnnnnnnnnnnnnnnnnnnnnnnnnnnnnnnnnnnnnnnnnnnnnnnnnnnnnnnnnnnnnnnnnnnnnnnnnnnnnnnnnnnnnnnnnnnnnnnnnnnnnnnnnnnnnnnnnnnnnnnnnnnnnnnnnnnnnnnnnnnnnnnnnnnnngttgatatggtcggggttgggggggttgaatcggccgatgcggccgtggctgccgacgtcttccattgccccgaccccggccctagcaactcaagagaaggatcttttggaagtggaattttgagctatgtttcttgttgcaatcaccgactgagaactggcccatgtcggtggcctggttcctttttctcgcgcgggccatgagcctgctgctcgtgtacctgaaacatggtatgaggtgctgaattcctggggaagcgttgatagagggaggtgtgtctcccatctcataatctcaatacggagagttcccacggggaggcatcacttcggaaaaatcacaagttccttgatatcaaagcaatcaaagcaatcaaagcaatcaaagcacattgaaagccgtcctaagacaacaattggaacgtcaagtatagaccgaattccgctcttcaagcctaggttaaagtctttgctcatttcttctttctatctgataccccaggaagagagagagctgtgtcaggtcgcattggagagatgtcagtttggcggaagtcgagcaccatcaattccgatagctaggagagataaatcacgggcacagcgcaagaactcgactaagatgccttgagaataaagaagtagatgttgtactccgtgttgtatagttgacgatcgaatgccaaggaaacatcagagccccgccattcaccgaagattcaccttcggagtatggacaccttcggggtatggactcttgtcatgactcattgctccgatctgcttcaagtctgagttctttcgttacctttgtgcgcttcgtttactgcactctagactcctactcctctcggcatcatggcgcaagaatcctcgcaagtcgcgccccgctacctgaccggcgataaggccggcctccaggaattcctagccagattcgatgtgagcacacgttttggatctaccgatgtactagagagtcctgttactaaccagattctgtacaggtattcctcttcgactgtgatggtctgtcccctctgtatcggccgaagctccccgcagcgctgaacgcgtcgcaacaaccgctgagacaataatatttaggcgtcttatggtccggcgaccacctcttccccggaacagtagagacactggagcttctccgaaagaatggtgcgcattaaataccaagtgcgcaaacagaggttaataatccccagggaagcaaatcgttttcgtgacgaataacagcaccaagtcgcgcgcagactaccgcaagaaactcgaaggcttagggatccctagtacagtggtcagtgataccaccgattaatcacctcacccagtggcagcgactcacaaccaaacaggaagagatcttctcctcctcatacagcgcctctatatacatttcgcgcatcctccaactccccgaaaacaagcgcaaagtctacgtgattggcgagacaggcatcgagcaagagctccgctccgagaacgtccctttcatcggcggcacagaccctgcctaccgccgcgacgtcacgtcagaggactacaacaagatcgcggcgggcgatgagtccgtcctagacccggaggttggcgtcgtgctcgtcggtctcgacttccacgtgaactacctcaagatcgcgctggcataccactacatcaagcgcggagcgatcttcctcgccacgaacgtcgactccacccttccgcactcggggtcttttttccctggcgctggctccatgagcgcgccgctgataatgatgctgaatcaggaaccggtcgctctcggaaaacccagtcaggctatgatggattccatcgagggtaagttcaagtttgatcgtagccggacttgcatggttggtgaccgtgtgaataccgatattcgctttggacttgagggtaaacttggcggtacgctgggtgtcttgactggtgtctcttctgaggaggagttcgtgtctggggatgtcaggcctcatgcttacttggatgcgctttctgatttactagcctcggagggggcctgaaagatttgtattataacaaatgttgtatttagagatagacatacgaacacaatgattcacccatagaatatctgtagccagggctatcctatcgagtttcgcttcttccatgacaaaatgtcttcatacgggtatgtgtactacaagtaataccaaacaagtcccctcgtagatcggaaatatcaatttaccctcggcaattctccccactcaatgatgtccagttccacagctccggggcgatggacctcgggagttatattcaggcattggaagccctaattagttcactaagagctttccaaagttgataattaactataactaccagcttattaaaaaggataaggaagtcccctaaatccaaaggtcgggtttattctacaattcgataaagtccaggtctctgttcatgcgcctttcagggcttaattgttgcttccatctcgcatcctatacctccagccttcggtgaccggcaaaaataaccctatcggatggcctactgcatagagatgtcaccatccctatcgggaagagcgctagctagtgcagtaacaagaattccctgtatcggtttagctgtgatgtaagagattctcctagaatcaatactcacgatgtcgatctgttcaagaaggttcattgggtcgatagtatggtccttaagggtagtgtcagtaatgaatcaaaatagttcagctgggggatcttgtacgcggcagagtgtctcgacggcggatttccaaagagcgaatagtggacaacgccgctgaaggtgtctggggtcgtggcagaggtaacaggccggtgtgatggcgatgctgctctgtgacatactctttatttgttagttgttggtctaaaagggtttgttctcagactggttatagatatgagagtggcatggtggagtatgacttacctggtgctggtgttggccttggtgttgatactgttattgtaggtttcggtgatactgttgtctatcgtcatgaccagctccttgggtagctctaccagcacgattggggtcacgactagctccctggcgttgtctgacagggcgtgtagagtccatatcaagatgagcgagaatataagtcttgaagtcgcagaatatgttgaggatcaagacttgggaatttcagattcttgaccaaagatgagagttggtaggagatacgaagtagaacggcaagctccttcatggttggttaagcagagtaagagggagttgagctcctctcccctaaccgcctcctatgcttctcctacctcctttttgtttgacgcctgtatttggatcttgctttattgctggtaaaacgaaagaaaggtctgggataaggctacaatcgttgtttgatttaggggactttacttcacgctatttccaagtctatattgttatttactggcgccagctcatcgacgtcctagtcttcagtcaaatcattgaatcagaagcgtgtctaccccctattcaccagaaaagctcaagacgcagtcatgtacatgattactagctatgcgtgtgcataaattactcgtcaagtagttcagactcactcggtacttagtagttcacagaaaagcaccgtgaaagggtatcatgatcattccattcgaacaagatctgagtgctaaaaaaccgaatataacgcctcaaacatgtaggcgtccttgtcctgaacgccttttttccgatcaaatattcggagtctcactgctgaccataagggtcaagggttggggaaaccgcctctagtttccacgcagaactccagcgatgcgtaatgctaggtccaacatggagagatgctcgtcggatccatcaaccagtcgcttgtcgacctctgagaagagcatgacaatcttgtttttctgaatatcgggaattgcctcgttgaacactacacggcggtataactagaaaggtcagcaaaggtatggggaacacccaggaagaagacaaacctgtccaaccagctgcgtagcactccagccatcagccacaatatccgtaatcacccccgagacagcctcgtaggccgacgcaccactcgtaggctgcatagcctcgacaagagaatccaaaacatcatctggcagcaccccggcgatttcctcaatgctgttcaccgtaataacactagaattactacccacatccgtcatctccgcatcatcatcggcatccttcacagcaggcggcttcgtaggaccgaccaagcgcgccgcgctctgcagatacgtgatggcacgacgcaaatcaccctcgccacaccggataagcgtatcaacaactccatcctcaagccgcaagccctcctgctctgcgatattcgagatccgctcaccagcagcgctattatccagcatcttgaaccggaacttgctgcaacgactggcgagcggctcgatgatgcgcgtgacgtagttgcagacaagacagaaacgtgtgatccgactgtatgtctccatcgtgcggcgcaaagcggactgtgcgtcttgcgtcatgctgtctgcctcgtcgaggatgatgatcttgaatggtggacatgggtactgtgcgcggtaggtggcgtccaggcctgttggttgggagagctgggctcgcgcgaaattcttcactttgtcgcggacgatgccgataccgcgctcgtcggaggcgttgagttcgaggattcgggagcggtaaagggcgggcccgaagagggatttggcgagggcgaggattgtggatgtttttcctgtgccggggggtccgtagaagagcatatgggggagctgcgagtgttattttattgcttcaattgttcggggcgggtggtttacgtttgaagcttgcagagtgcgccgcaagactttggtcgtgtggtcttgcgcagcaacatcatccagggtcttggggcgactaattgatattagccaatgctgggtaagctggaatagagcattgacttactatttctcaacccacggctggagtttagttgagtcttccttgttgtcgccagccttgagcttagagctgctggatgctgcggcggcagcggcacgagccttattattgaaaaaagaggcagccattgttgttgaatagccgaaattaacaaggcaggttatctcgagagctgctctgcgatgtgttggagtctttctgacgccctccacaatcaagacgcgtctccacgtgacacgcgcagcacttaaacactagccaatgagagcagctcactgtctgagtatacttcaacctatcgccagcgttaatgctggtcttatagactacggggatcaacattgcgagggtcatgattgcatggtatctcattaatgcttgtatcaatatttatagcttatagctcgtctcgcaccggctcctccatcccagcctcgaacatcctcttttttgtattccggggaagctttgcttgtcttgccctctcctccggggtgacgtcgtcaatgtctacgcttttttgtctctcttgctcgaccatatcgccaattttatcaattacacgattgctgtcgatgggtgcggtcggctcttgctcccaggcggtgctactggcggtcacggttcctgttgtagccgctgtggccatttgatggatagccgtagagacgtcccttgagatagattgagaagcagactgcacagctgtagtggatagcccggctgcacctgttgcaaacgcaagccgagcaaagagcttcaaaggctgccatacgagccaccaaagaggcccataaaagacacgtcggaataggagccagccaattgtcgcaagaaggatatagaaagcagtctcaaggtaccatgtgtcggacttttgggaacggagaagagagttcgctagactgcgagttgaagagagaagtgtatcaaggctgctataggactcagacagagaggagatcgcggctgtggattgttctgattaagaatattagcgtctggtaggataaggaaatggatagatgtacttaccaagagttgattgggcaaaatggctacgggagagctccgcctgcatgagttgatgggttctgcgtagcgcagatgtcacatcgttcgaggcgttcaaaacaagatcatcctgggtgaacttctctgacggcttcttcttttcggaagagtacgatctcgacagcagcaaatctctctccttccgcctggcgagttcggcattccgcttcgcttgtaattgggcggttcggaaatcacctcgtgttctgaagggccgattagcacatgctacatatttcaagactagccagtggactatgacaaggaatctcgccggcatgcgcagtcgttgaagggtatcttacctcttgagatcctcagccaatcgccctgccatagaaacaacccgctctttctcaacctccttctgtccatgcacagcagatgacttgcgcctgctatctgagccagtttccagcgcttcaacctccacacgcagcagctccaactcttgttcggcttccttcagccgggaatgtatctcacccccaagctccagacgtgcttcatctccctgtccaatagaagcagtaaaatcgcgcagtcgatccacgaggggctggatttgtcctagggaagccgagagctctttcacgcggccctggagagctgtcgtggaggacatgttgttatagacgcatccaagtgctgtttgttcggggagtagaaggggtgtctctgaaaatagacacaagtgtagaataaaccgagagattcaaaacaataagttgcttcataagtgtcgagttgttcaactcaagagttgccagcgtcattaggcgttgtgtttgcatccgagtcaaacatgccccatttcctccaaccgcaattcgcaacggcctccgatgtggtgagaacttccaattgaccttgcgccattacctatcagacttgtcgcagaccgactagggtccaagcaattttctccttggatcaatcttccaccgagggtcatttgtccaactgctgcgtaatctactgcagaaacaccacctttaaaaaacttcccgccaaccctcatccactcaggtacgcaacaacggaaccaagacggagctataggatatcattcgctcttgaaagattcaaactgatcaatttaccagtccacaaaagtctctctcccactcaccactcaaccgcaacaatgggcatccccatcgccacgataaccaccttccggaccgcctacaaccccttctcccgcgctgcccggccatgccgcctcttcctaggcatgctgcgcacaccagacactatcccaaccagcagcccgacgcacattgatatcaaggtcaagcaattgccgcgcaactccaccgagtcaccgaccatgactatcgggttcaagggcggcaaggaacttacgctggatgtcggaaagcgcgggctgaagattggcgatgtcattgaggaggtgtctcgtgttggccgagctctgcagcgtgaggccagcttgaagaactaagagattttgttgttcgagcttgtattcgtgtattatattacctatcattttcatctaacgattttggcgctgttggcgctgttgggcatgtggaatacttgaattattgttggtaaaaaccataagatgttcatgcttctacctgatactaggattactggagtggatttgatcttgcacaaactgatcctgaaagtgattgtttcattgctatccagttgaatttgcatttgcccagagattactcttctctacactgtagtaagaatttgaatactgagagcgattcattgacagttcagaaatgggtcttttcctcggaaaatcgaagaatgcacttcccatcaggcgtaagatcataggcttggaagttttgtgttagttttataggtctctttcagagaatatcatttatactgcggcacctgagatgaagaaccacttgtcaatgcttccatcaatgggagcaggggggaggttctcgttgcgggggatggcagcgagctgggcctggtcaacacggtcgggagagttctcgacggtggtgttggcactgtgcaggttagcttcaaatcctcaaaataggatacatgcatgtagaactcacaggctgatatcgccacggggggtcttgccagtgacaagcttctcccaggcatcggagcactcgcggatgacatcctcggcgtacttcttgttcttgcactcgccggagaaggcgaactggttctcgggctttccgtcggggatcttgtagatgcggaaccactcgttggtggcgcgcatgagaccaggaagctggcgctcgacatcctcgatgtcgttgagcttgggagcaagagggtcgttgacgtcgatgacaatgatcttccagtcggtctcctcctcgtcaatcagggccatgacgccgagaaccttgacctgcttgacctggccggtgtagccgacaagctcaccaatctcgcaaacgtcgaggggatcgttgtcacccttggccttggtctcggggtggatggagttggggtcctcccaagtctggtagataacgtcagttttctgcccctcttcttacccacgggtgtgggaggaaggttcgaagcttacgcgagggaaggcaccgtagttccagaggtaacccttgtgagggaagcagttgcggacgaagcggagcttgcccttcttggtgtcctgcttgatggggttgaggaaatcatccttggagatctgtgttgatgcgatcagtataaagctgaggtcaattgcgggactgtgtgtcgtacctcctgcttggcgttggtccagcgggggatctcaacgaccatgttcaggatggtttgctgctcgttggcgtagagaggaatgtcgtggaagggagaaacggggacgccatccttctcaacgaacacgcggtgctcgagagtgtatggggtaccgatcttgcggatggagtaagtcatgttgggcgaggtagacgaaatgtgtcgagatacttgtgccacacgggataagggagaagaaaaggaagaggaagagagaggggcagcagaagtggggggagccagcgctgctgatgtgcgccaaacacggcgggaggcggtggaggtggcacttcccagtcgggccaagggaggacaagtcattggctgtgttggaaagctctggatgccgtgtttgtttgatttagtatttcagatacagaacttgaaattgaatgttataatctcaatcaaagggtatagctgcaatgcgtggcggtgttaccccttgtcggaggtttgtatggggaaaaattaaacatggcagttccgaaactcggcttcttgtggtcaccccgactttgatatcccgactggaccaggccaatgtggatgtctattgtatacaattgactctatgcggtgagacgtacatagcatacatgtacgctatatcttttagctatttgacagatgtatgttgtacaccgcatgtacatacccgaccccatactatgacgccgatatcggcagtatacgtacgcctatgttgtctagatcaatcgcttattcagtccaattgtattccttcaactgtagaatattaacaatagaggcatcttgggatcacaaccttggaagtcatgtcgtgatccttggctgggaacagagcccaatgattggctgctttagctcagcttgaaaaataccagaataaagtaaattacatcaatacgtgaaatccaatgacaaccctcatttaaaaaacagttatcgccactatcttcacgtgactcgagctttccatcgcgagtcaccccaggaaaaaaaaagccgctctatactccgctctccccgcacacagcatatgggaatgctatgatcagaattttccgcaaaacaatgacaactctcgcaaccgcagctacaaccgcccccgcgtcggccgttgtgccgcgcgtgtccatccctaccaacggcgtcgactaccgcaacaaaatcgtcctcgctccaatggtccgctcaggcgaactaccctcacgcctcctagcactgaaatacggcgccgacctcgtctggggcccggaaacaatcgaccgcgcgatgattggcgccgagcgacgtgtgaacccacgaaacggcaccatcgaattcacccgcatgcccagcaacggcggccgccctaacaaatcactcaaagaatcagtcatctaccgcattgacccggcgcgcgaaaagggacgactagtctaccaagtcggcacggccagcccggagctagcagtgcaggcggcgcgcgtcgtggccgccgacgtctcaggcatcgacgtcaactccggctgcccgaaacccttctccacgagcggcggcatgggcgccgccctcctccgcaccccagacctgctcgtctcgatcctggaggccctcgtcaaggaagtcgggacacccttccaaatcggcatctcggtcaagatccgcatcctctccaagcccgaagaaacagaagccctcgtctcgcgcctcgtcaaaacaggcatcacgggcttgacggtgcactgtcgcacgactcccatgcgaccgcgcgaacgcgcaatccgtgaccaactccccatggtagcgaggatctgccacgacgccggtgtggcgtgcgtgatgaacggcgacgtgacgtcgcgcgaccagggcctcgcgctgatggccgagtacggcgttgacggtgcgatgatcgcgacctccgcggagaccaacgcctcttgtttccggactaacgaggatggcggcgtcgcgccgtggcgggacgttgtctacgagtacatgcgcttctgtatggagtcggagaatcggctgggaaataccaagtacttgcttaacatgctgattcccggaaaagacaaagagttcaaggatgcgaaactgtcaaagacgtatcttgatatctgccgcgcgttgaaattcgaggatttgcttcctgctgctatgcgtgttgatgagctactcggtctcgatgagaaatgggaggctgcccccgatacagaatcccaggcggagcctaaatcaaaggctgtgcagaatgccaaggtgtcggaggctgctcgtgcagctggcggcagtgctgttcggactaagacgccctcgccggctgttcatgcgggtggtcctatccggcggtcttctgctcctcagccggctaaggttgttcaggttgatgctgagcagccagctgttgaggctgctattaccgctgcacagactcaggctccgtctcaggtgacggcgtaaatgatgcttgcgttttctgtccattgtcacttctcttcacatcttgtcttcggtcccatgcatagccttcggttttctctcagttcattcttccttttatcttgcttttatctgcattctgaggtgtttatgattgctttcatctgttctctctatagattattccccacttatatacaccatgctccttgatgactatctagtccttattacaatacatatcactctacgcttaacagagcttataacatcgtgtactaaatcaatggtagttggattcgatcctctaatctaacaaatgatcccccccaaacaccagtattatgcattctctgcatcgccatgcagatactcacaatagaaactccagtgtaccctttttttgttttttttgttttttgttttcttgttttctcttctctttgcgctcgctcacttctctgcagctgccgctgcttccgccgctgcctccgcctccagctcggcaatcatcatttcctcgacggccttcatgccgacctcctcactcttcttggccccagcctcgtcatctccagccacggcctggtcaagtgccagcttggtctggcccagtgcgtggatctgctcctcgatggtgctcttggtcaccagacggtagatctcgacctcgcgggtctggcccacgcggtgcgcacggttctcagcctgcacatcttcctgtgggttgaaggaagaatcgaagatgaccacgcggttggcacaggccaagttgataccggcaccaccagccttggtggacaggaggaagacggggatctcggtgcgctcgtggaaggcgtcgaggatggactggcggtcctccacgttggtgcggccatccaggcggacgaactcgattttcagggtttccaggacgtgctcgaggatgtccatcaccatcgtgaattgagagaagatgagggtgcgatcgccattggcgatgaaacgggtgagaagctctttgaggtgctccaccttaccggagtccatccattcatcgttcttgagcttgaacttgccgagggaattggggttctccacacacatgtggtggcactcgaagtcgttgtatggcatgagctcctcgtagatgatgttagggtcggatagcgaccacttgtcttccttcaggcaggccttggccatcttctgtagaatctcgttggtgtagtgacgacgagcaagaagggggtgaatagcggcctggcgcagcttcatgagaatgttggcggacttcgacccagtcttctttccagcaagacggtctgccacgagctggcgcacttctgccttttcgtgatcgtaaatcttgacctgagaaggtttcatttggcaccaaccaacatgagagtgcttggctggaagatcaatgacctggtgcttctttcgtcggaggataaagggcttcatcatggactttgcgcgctcaatgcgctgctgagataggagagtagcgtgggactcgtcggtggtcttggccttgttggaaaagactgcatgaaggtcatccttgtgctcgcggaagaccgagggaagaataaagccgagaagagatgccagctcctgcaagttattctggagaggagtaccagtgagaagcagacggaaacgtgcccgaattcgaatcaacttttcgtacagctgagattgatggttcttcagcatgtgaccttcatcgtagacacagacagtgaaatccatatcacgcaagaacttagcatcaagctttgccttggcaatggtgtaggtagtgatcacaacgttgatctcgtcacgtcgttcctcgatctcctcgcggatgagagcacgctcattgagaccggcgtagtaaggcatgacgttcaagaccggacagaatttctggaactcgcgaagccaattctcaatggtggaagatggaacaacaatcaggtgagggcccttaatgcccttttcatacagatgcgcgaggaatccaatgacctggcaggtcttacccaggcccatgtcatcagccaggatgcagctgaggttcttttcaaacaacaatgccagccagttgacccccaccacttggtaatccttcatcaccaggtcgtcggccatgatagaaggctgtgagataaaacgagatttgcgctttgaaacgaccagtttgccgctttcttcgtcactttcggaggattgacgttcagttgtaggagttgcaataccagagtcatgttctgatttggcaggagcaaggttggtaatttccaagtcgccctttttcccgaaggtgtcgacaccccatttcttcatctcttcggcgactggtttgccgagctcctcaacctcgccaacaagagcgtcaatggccagatatccagtccacatatcaatacacttgtcgacaatcttgtctccgatgggcttaggggccttgcctcctctcttgcccttgggcttcacagtttgtgcgactggagcagagacaacacgaacttcatcgagagtctcgtatggacggttcgaaatgatgatttctgcggttgcttcggggatagaggcgatatcagcgagatcctgaacacgacatgtgttgaagaatttcaggaccttggaatccaaaccgccagcggtgggttcttggacctgaacgtttgaatcatccgaatcactcatcatagcctcgggggactcggatcggtcgggggaaggagctttgcggcccttctgaaggcgtcccaacttctttttcgggggactgtcatccttgattgtgatagcacgggaaggagaaatagcacgggaaccatcagacttgggtccacgaacaagtcggcgacgaggctttccttcgtcatcggattcctgacccttgggctgcttcattgctgcccacttgtcctggatggtgccacgggctttgatgttctgcttggccatgggaacggggcctgtagcgggggaggcactcaattcatcatcggaggatgcaatcaccacaggaccattttcagaatccatcttggcaaggatctggagcgcgccatcgtagtttccctttgctttcaacatcgcatccatacaggctagaacagtcatatgcggcataactttgagaatacgctcaactttaacacggagtctgaagtcgttgatttcgtgaagggggatgtctggaactcctgaaggtggcgcgcgagagggcgcatcctggcgggctttcttcgtggcaactcccttgggtgccggcggactcatctgatctgcagtccgcttggtggcggttccagcattttttggatcgtacatggcagaggcagtaatttctcggaaccgatccattgacccagcatcagggcgcacgggcgactccatgatcttttctttttcagaatcccgagggggcttcgcaaacatggacggttttatgtcgggactttgtagatgacactcttcgtctgaagagccacctcgatatgtcgggccgtcgtcgagatcaaaccgcggtgttcgtttggtaggaccagaggcaggagggcgaaattgcgtcccagaaggagcgatcaaggatgagagtagaccgccttggactcggcggggaggagaaaaggcagggcctagcggtgaagatgcagcaacttgaatgacagtattgttatgtcttgagtagggatgttcaagtagttgtgttggttgggtcaatctttgcgatggggttgtcgctgggagagttgcgatagtttcgtagtcttcgccgggaggggtactcgggatggtttttatatctcgagggggggtactattgatagcttcttccattgctctcaatacaacaatgtcattgaatcatcgactcatctaattgttcagcgctattcaggaacgttttttctgccaaagcggacacgcgccaccggacgcgcccaatcacgtgtgagagccgtcaattaagctgtgaatgagaacaaagaggtgagacatcttgagcagttaagccacatagagacgactaaatcagactcagttctcaacttgaatgaacaatgaaccgcagggaacagaatcggaatgagacaatgagacaataaggagtcacatggcatatacctcaacccaccaatcaaatgccatatgacggcgggcactaaccttctctccgcacttgcgatagcttcagctcctttgtctctctgaccttccctttttcatctttgcctttgactcacttggatattgttgctctcaagaaacaaggatgtcttcccgacgccccgacaaccagtcctacgccgatgttgcggcgaagcctgaaccgcaaggcacttccgacgtggccccagctgttcctgcgtaagataatgaccttagaagcttagattgattcttgaagacatattcttattagctctggtatttagagatgtgatctacaagctcctcggctttacagctgccatgatcgttggccctattggcatgtatttcttgactgtgaattcaatcttcagtggtgagtatttctgcttccgacttgcaatggcatatgctgattgaatcgatgttattcagggagctcgacacttgctggaatcaccgccgccgttaccgccaacgcggtcctgttcgcatatatctatgtcgcctggacggaagaccaggaggatagacaagcagccagcaagccagattcaaagaaagcccagtaggttggataaaccggatctgaagaaaatcattacttttcggcgttacggcattgttcaggtggttggggtttctgttatgtataattgggatggaacaacttcggccatctaaggactcaattgtaaaactatacattgactgagctattcattttactgttatatatcccggatatcccaagataccaagccccatacttcgatgtcaagccattaaaaagcgctgttcatgttgaaagaaccgcatctagagacgagaaagacctcgacccatgctccagtatagacagatacgccgatatgcattgcaacagaaatcactcccacatattcccattctcggctccacatccgcttaggtaggtctgcgcttgacaaactcctccaagtccgccttggtagcaacacccagcacaaacttgcgcgcctcatcagtgaccacagcaaactgctgcttctcgcgcttctcgccattcggccccgtctcgctctcgaagaagttctcgagctcctcgagcggcgtgttcatcgtgatgacctggtagagaccgcgtttgcggttgaaccgctgcattgccgcggagacggggtcgctttctttcacggtgccgctctgcagtagctcacgtagccgtgggatgctgaggtagcctagcagggagcgctttgtcggggagataacggtgaggtgcgtgtagtcgcgctcgtaggcggccattagggctgtggagattgggtcttcggaggagattgagagcgccgcgggagggtcgaggtcttcgattgttgcctgttttttgttagtttgggccagatggttggattgggggagacggacaccgcggtacttgtcggcccaggctgctgtagatgtatttgtgtcggagggggtttgcttctcgcgagtgaaggcctcgctggcggtcgagtatgaagccattttgagtttgatcgggatgaggggttggtgaggggcagtggataagttggagagttggagggttgttaagaagaagtacaggtagctggaaagtggagaataattgtccaggtgtaaatattgagaagtcaagtcagggttctcagtaggtatacctaaatcgtgcaggtcaagagcttgcaaccttggggatgactttttgatgtcaagcttggcattaactccactacggaagacgcttgcggccacggaggctatcagatctatatttctattttctctctgcttgcttttaattgcaaagttagccctagagtgtacttcgatgatcagaagggcataaagaaaagtaggaaattacggactaaagacggcctctggtcggtataacatcacccactatatatgaagtatgtccagaccataggcaattaaacatagcatcaggaaatgttataatagatgccccgatctagaatgatagaatctactttgcggaatatattcccataagtatatatacaaacggggttctctcttggcctaggattgtaatcctggccaggggcatggcatgtatacatgttgtagcatgtcaaaaggcacagactacacggagatagctataagtacattcaacctcagatagctgttatttaaagcgtaagaattaatttccccagagtacatatcaagactgaagtcatactcctcacaagtccggagtaccccgtatccttgtaccccgctagcgccacttacaacctccgcacgtcattgtcttgggatcttgatttcccacctcatctcaattatattcaaaatctcatacagattcaacaggaagaaacacatcagtacactcaaaacccaccctttggtggagatcaccggatatcaagccgactccacttatacccactacccgaagtacaccatgcttccggactggatcaacgctttcgccgcccagcatcctctgggtgccgtgagcgatgcgaagtccgcgaaaaacagaccgttcacagcttggagtgcactcgacgacgtgaagaccaaggccgacggcattgccaacgaggcgagccgggaattcaatgtcgcaagccagaaggctcaacagaagaccggcaagatccagcctggctctctgaagtactatgtagcgtgcacatttggtggaatgatggcatgtgtcagtagcttctctgtctgaattatgatcgccagatactcacgcatatcagggccttacccacactgccgtgacacccctcgacctgattaaatgtcgccgccaggtcgatcccaagctctataagagcaacctacaagcgttccacactatacgtgcggctgaaggtattcgcggtgtctttacgggctggagccctacgttcttcggctacagtgtaagcctggataacctgtgggtcttttaccttaattatctatactgatggtatacaggcccaaggagctttcaagtatggaggatacgagtacttcaaggtgttctacagcgacctggtcggccaggagaacgcgaaccggtttaagactgccatctacctgacagccagtgcctcggcagagttcatcgcagatctagcgctgtgtccgttcgagtctgtcaaggtgcgtggtcagactaccattccgcctgagattacaggtactttcagtggtatctcgagtgttgttgccaaggagggcgttgctgggtgagttgacatatatccttttgttctggatcgaatctatatactgaccctaccagtctgtacaaaggtctttacccgctgtggggccgtcaagtcccctacacgatgatgaagttcgcttccttcgagacgatcgttgagatgatctaccacaatctgccaggccagaagtccgactacaacaagggtgcacagactgccgttgcattcaccggcggttacctcgctggtattctgtgtgctgcggtatcgcaccctgcggatgtcatggtcagcaagttgaacgcgaatcgactggcgggtgaggcattcggcgctgctatgagccgtatctatggtgatattggcttccggggattgtggaacggactgcctgttcgtattgtaatgattggtactttggtgagttgttcatgttcagtgtggtcaagctggtgctaatatattcgtatagaccggactccaatggatgatgtatggtctcgctttctttcgtttgtgtggatatatactgaccctgattctacagctacgattcattcaagattttcatgggacttcctaccaccggtggctcaagtgaagacaaaaagaagtaaggtgtctggtttgattcgggtagtggtatgcacagctcctttatcctttaccatctcggcggctcctgcgatattctatcaagtaatacatactctctctagttatcatcgtaatataaagtaaccgccaagctcgctatcggccaattacagtttgtcagtggccgcctctaccaatcggaggccgatatcttatcgtccctgcagttgtcgaatataaaatgtcaatgtcgttgaataacatccgaatgacatccaacttagataactagacaagcgaaataggggacctcgggaaccgcttggctcatttcacgacgaaccacctctattggctgcgaatccctgtattatctacccgatagctaccatccaggtggattatacttaaaaagatctagatccccccgaaatccacttctctacattccccgtacgacttaagaaacagtaagttcacgtggatttccccgccatcgcatctgtacctgcatgtatcgccccatcgataaatatcttccctgccccaccattcttcctttcgcatctaccaccccgcctctacttgcaacgacacatctacgaacctgaacatctatctctgacagaaactagacaagatgcccgataagacagaggccgaggcatccacatccgacgcaccgatcgtctctcacggccgaggaggcaagcacccaagtctatgcgtcatcgcgcccaccaactaacaagctcgaatattaggtcaaggcaacatcggcaaggataacactgagtatgtcccatcgcagtcgcagtcgcaacaagcgacaaatactaaatatcgaatagatacgtcgatggcgagatcgtccgcgaaggaaactacggcgaccaaggtgatggcgcttactctgccggcgtgagtacttacctacctaccttcctacctacctacctacatctatactttgaacacccaaatccatcttttagcgatgtccatactgatacaactccagcgaggcggcgctggaaatatcggctccccgatgatgcgccccacgtccaaggttccccacgacaccgagatgatccccgagcttgcggtccgccactccacagacgaaactttccatatcggggtaagcagagagttgtttgctttgctttgcgtttgatttgatttatgattgattatcccgggcttatggtttccctttccgaatgcggttgtttttactttctttttttcccttcctgcttttggatttcaggctgactttttcgtagcgtggtggacagggaaatgttcattccgaggatgcgacgaagggcaagaagaaggttgccaatgagggattggcggataagttgaagaataagttgctaggacggaagtagggtagggccttttcatcttgtgcttcttttgtgattcccaattctcgcggtatcaattaatttccgggttcattccggatttactctttctctaccatgttatatgtagataccaatctcgaacagtaagattgacggatatcatgggagatagctatgtggagtagatacagatcaatatgaataagaaattaaaaacgaaaacaaaataatcaaagaaacaaaataagtgccaaatccatgacgtgtcccatgtgtccatgcatcataacctcattagagcatgcgatgaaagaagtgaagaagcaaaaaaaagaagtaataaacacaacccacatccataaacaaatagaaacgccagtctgcagattcccaaacaaaaggagaaaagaaaatgaagtgtccagatatatcaatctcacatggacattctttatttatccttgctgaaccggcgtttgaaccagctctttcttttatccgctttctcacccttcttgctgacagtcgattgtgtggtggagatcgggacacctccaacgggtccgcccatggtcgggtcgcggatgggctggacagggggtgccttggagttgaacccgttgaacccgtactcggcttgggaccgctcgtccagacgctgttgctgcagagcctgctgctgcaattggtcgttggagctgttgatcgagctggggtcggtggactggccgtagtctgtggtgccggaattgttcgacatggccgcgatgttgtcgcgcgaccgttggtagccgtattgcgagccggcgatgttggggtagccctcggaggggctgatgggcgacgagggtgacccgcggggatggtgcgagggacgtcttctgccgttttggctatatccgttctgattatatccctggttataggggacagaaccctcgggtgagagaggcgtgttttggtacgcgttcacgatgctgtctggtcgcgattggccgtagtagctgttggatggaccatttggacctgggaaggttagaagggatcgaagatgggattgaagatgggagagatagcatacttccgtagtagctggtccgtcggctgaagtcgcccatttgtgacgcatcctctatcgaataatcagcctacattcattgtgactttccacagtgccaatacctgttctagcatatgacgcacggttattgatacttgtgccgtagatagcagcctcaaacgatcgaatggtatccaaggggcgttccagacgcggccgagtgggatttgacaggtcgggatcggctgaacgaagtaaggagttaggagacagtcccagggaggaaagattgccagtgatacggactgataacattgccatattgatccttgaattcaagctcgcgcagtgagcccagattggacttttgcaaggccacggccactattgtggtgtcagttgaagtaaaatgggacatgggaaatgcgaggtgcgaggtgcgaggtgcgaggaaatgcgaccgggccaacaaggtggtaaacatactaggctgaagctcgttcatggcgataagtggatctgctttggtatgtagattgcgacgagatttctcttctgaagactccgagggaccacgtttatggcttgttgatccggacttgtctgacttgtcggatttcacactgaacccacgactcctctggggagtgggagattggggggagtccattttattaggggcagttcggtctttcttagcgtccgcgattcaaggaatgtctgaaacggttgtgatctaccaccgagagtggagcgtgggaactgccaagaatatcacgattcagctgtagattgaatgacggtgaggctggtcactagctgaaacgatcgacacgatgggatgagtggtgaaggagcagactgggagattggattgtgcgtgtgattgcggtgattggtgatttcggtgtttgtgatgatttcggtggtcttagtgattctagtagcccaagtgatatggggtgtgaactgtcaaaagagtggagcaaatgaattacacgagttcaagagtacaggggacagagaagcagcgagagtagagtgaaactgtagaattgcagagaaaaaaaagcgaagatatttccaaagttttccaaagaggcgaaagggaaatggacggtttttatcggtggaccacgcaatcccaaggtctactggtacttttcgagtgggttttcgtttttttatgcataagcaggttattgcggttttattttagtttattcagtgggtagatctagaatactgagaagactgagttggctatatgatagtggcatacatagtacttattagctgtcttatacaacatacacatcctattgactatgatccaagacataatataatacgtgcaacactccaatataatccccagactccataaaatacatacttaggcttcctccataccaagaccagcccaagaccttcataaaaagtctcaccttttgtatttgactttctctttggctttcattccctttattccccttcttccctttctccagcctttctagaaactcataccgcgtggtacatccgggctattccaattggtctgctcttagaatgcagtatgctgtccttgtatgcattccttatgaacaccctccgttgtgcaaaccttagatttgagcgaatgctaatgaatgcctacaatgaatgcccgagtataaaacctgaaacctcacctgttcaccaacctcgggtctgaatttctagatcggaggcctatttttaggaaacccacacgggccaacggtccgtggtttcttactcgacgcgcaagacgatcccgaggcactccaggctgacatgagtcacattctgaagtgatagaccgttgagttataaataaaaagcagagatttccacgtcaagggtttcaatatgaggctggggtaagtcaaggtcacggtctcggtcacggattatgcacagccacggcataaatatcggcacgggattaatgcatccatcacttctactaaacaatcaccattcctgattctgcacaataacagaaggaccaacatattccttccggcccttgacaacatacatcccaaggctgacgataaaaaccccaacaaagataaccacactccaattaaagttctccagagtgacgtcggcatccccgggccacaacgaccagaagaacgcgaaacagcagtaaaacagcccaataatattaaccgccagtccccaccgtcccatatcccaccgacgcggcggcagggtatcaggataccagatcttgcggtagatcacgcagctaatcgatgtaatatacgtgtacatcagcgccgccacgttgagcgagataatagcgttgaacgcagtctcggaaccgatattgataagcgataacgcgcagctgatgacgcaggacagcgcgatggcattcacagggatctgccgctgggcatccactttgccgatccatttcgcgaatgggaggccctggtcgcgggcaaaggcgaaggtctgtcgggaggtggaggcgttgaagaggatattgctgaagatcacggggaggatgataatcgccgtgagtccattggttccggcgatagacgttgccttctggaagacatacaggaatgggaatcccgtggcgtcgtttaacgagtcttcgaccgacggcgtggcgaagagataggtgatgatcatgacgatcgccatgaggccgttactaaagtagccccaggccatggcgatcggcacgtatcgagcggcgtctttgacctcttcggacatgtgggccgttgcgtcggagcctattttgacttagtatcaggttggagtctgggctacgggcttgcagacatactcagagagccgtagatagctgagatctgtcccaccatcacgctcagtcccatcgtagaccaaccgccgtaattcttccactgcgtcacgaacaccgcttcggcggattggtgcggagccatcacccacaggacgattataataaccgcccacgatacaacgtggagaatcatcagtagattattcagtacgggcatcacgtcagatccgtacacattgacgatataaatcaccaataccatcgcaaagacgaagagcgtaccctgccagccctgaggatcgtaatccgggttccgcacgctgatcagtccctggatgatagttccagtaaggaatgagccggaggctgcgccagcttgccatgctaataccgacatccagcctataaacaatagcactagtcagaaaaacaacatccaactagagcaaacaaacagaccggtaatataactcaggaacttctgatatcgaggcgaagaccactccgaaacccagtgatactgcccgccagaagtcggagccatagatgccatttcagagatcgaggcgatgatgaatccgaatccaatgaatgtccatagataggagtagaagagacctggtaagcctccgttatacaagccttcgtaattagagctgaatacagcaggaatcagagatgtaaatagacataatcttgtagtatgatattcatactcacataagaataaactcccacgtcgcttgcaaaaccgacgcaaaactcaaagctgccacaggtcgcatgtttctcttgataatgtcagacatatatcaacgccgtgaaacgtatacataccttgaactcctgcgcctttcccatccgctgcatgtcaatgtcgtcgacacctgcgcctgcctttaagtcatgctctgaaaaagcatcgcgctctacggcttgcacctcctggtcctgcatttctagcccaggtgctttggtcatggcgatggataacctaaccagcgattgagcgggggagaaatagaaataaatagggtaaaatctaaaatctaggggaactagaacaaataactaactaccaaggcatatatcccacattccccgaataaaagtacggagtattggccgacatccagacgcctgcagggcttatcgtgaggctagtctctagggcttcgtgcggagtggatcctttggctgcaactggcccgtctgggtgctccgactgttgttgattctttgttcacatatgtaggaatgatatttgcttttattgaatacgagaaatgctctcaattttccgtaacgaaaaaagaccgtggatctcggtatctagtgcaaggggagggtgtacaatgtagggctgtagggaaagtgcatcgacctcccttgcgcgatgactatgtggggaatacgcgcgccgcagttaatttgtgcaaagtatatacatgtacataggtagtcatttctggcgaggatgataggatattactctcgcatggataagaagatgcgatagtctctagtctgctctttttccttcgggctagggcttacagctactaatatgagcacatcggagacattgagtttaagattgatacaacagggatagagctggtatacgtctaatttccatacgtgcatacaagctctatagccggatggatagcccctgtacaatatcagacccgtatgctgtacatatcaagcattacgggcgcataccctggtcacaccttaatgcagactgatattggtggcttttagattaaaagttaatttgaacttcgtattgaatggtcttacgtaggaaataataccgccatctagttagatcgattaatgcgtaggatatattccaatctattctacgtctcaatcgctctataattgctttgctaatcattatagaaatctggagaaattcaaataaagccgatcggctaggccgtcccagtttgtctggaaaggttcatatatttttatacataatgcatatgctcggcgttgagtaggagcatgaggggtatcttgtctatctattaaataaaaacgtgagttcccgggttgaatccggagaacatgcaaatcgaagaatcaaatgactcaattcgagcgacgcgcttaagcagttgcctcgtcggctattttggacgggacgtcctccacggtgacctgcacctcgtggctgtgttccaattccgacaggacaatccacgtgggaacgaacgcgataaccgtgattccaaagttgagaccgatgctgacgaagtggttggcgccgccttcggtctgcatggcccatgcgacggtctgtcccagagcctcgaatccacgcaggataccgcagtggtaggataacgatgagatgtcggtgctgtactggccgaccagccagtagaggaattgctggaaggcttggccgctgaaggtccagaagaagatcagcgcgtacgctttgttgaagcccggtgtgaaccagtcgaacaccggggactcgggtaggtcgtagaactgcttctgtaggatagtagcccagatccaggtgccgatgatcagggcaacgacggagcagaatgcaattctggcgcgggtcttgatgaagatggtctggcgatcaagcagcagcgccatgatgaacgaagacgcgattccggcgaagttggtgaggaaagatgagaatgcgcgagatcgcacggtgaagtaggtggtcagccaggtgctctggaagccgttgtagaagtaactgatgaagaaggctggcaggaggaggagcacacggcgagtgaagatcagagaaaaggcagccttgaattccttggcccaactctctttcatgttcacaatcacaatagagtggtccttgcgctgcaccttctcagcaggactgagtaggagcgaaatgggcagaccgaggcacataatgacaatgaagacgatataagtcgaagcgctgatcgttccctttccggccgtctgtgcgttcagtcccagactgattgcaccaccgacgatcggaccagaagatttcgcggtctgccagacagcgatgtagaaagcgcgctccttgggactgggataaccaatgataatagcggcctcggcagcccagaaaaatcccgctgagataccgcacagggcggagccgaagagcatgaaccatgtcgtggtgtggtaggtgttggtgtacagaccggcaccatagatcgggtaaccgatcgcaccgagaactagaccgtagcgtagaccaatacggttgttgattgcaccagcggcgatacaaacaacggcaaataatccgtagaccaaagcgttcgccgcggaaacagcgtagggctcggctgcaccacctgctccgaggttgttcagtgcatcccacattccaggggcagtgaatgagacaccactagccacggcgatctggaaggggatagagcggtaccatgaagtccgagacctggtgatagtttgagagtcatcttggacttgctcagaaacgacttctgacgcgacaggaggggccattgtaaatgtatgccctctcaagagtctttttcttgtatacaatataacaataaagaaaaaagaacgaggacctggcgaggaagttatataaaaatttgaagaatcaaggtggatccgctatatgtcgtgcttgatgccaagatattccaaaacagcaaaagcagaatctttgacacatcgcaacgtcctgatcaccgggttttgactagcttcgggatttggacagcaaccctgtggagtggcgtgacaggttgtgcaatttccagctcagaggccattttcttgtattgcatataaggcagttccatcctcacacattggacaacaatcgctcttttcgcgcgtcgcgatttgccagaaaggcgatcaggccaacactcaggaattgtgcgacagtggtgaccaaattcgagatgaatcccgctcgaaagtctggggcagaaacagccggatactgaaatatctgtgtccatgctgccatggcctggccgattgcattcatgcttgccgtgacgatagcgcgttcttcggcatccttggccatggtgatagtcgcccaactcatactgagcggactaattgctgtggaagatttagtatcgtttttgatgctagaaataacagaccagagcctgtatctgaatccacataccgccctcgaatcccgtgaggataaaccccgccagtcgccccgtttcgccgacattataaacaacgagcaaaatcacaccaaccaggacgggaatgctggtcgccaccgaaggaatccaaaagtttcgcaggcgatcggcggtaacgcctgctactagtgcggctacgacagacaacgccgttgcgattgtcggcaatgtgttcacccgtgagacggagtagatgtctggtttggccttgagatataggctaaatggcgtcgaatatggcgtgaagttctggtccattaaggtccaatgcaggacaaagacataccaatgccatcgtccgaagactcgcttgaagatggcccgggagactttcagctcactcggcgctgttagacctttcagacgaatattggcaatatcgtgctcggtcgcagtcaggaaccgtggctttgcgcggtgaggaacatctgggaaaacgatatatccactgatctgtgttagacgaacagtgaacagcctcggaatagggttcttacagaatgcaaataggaattgtgataatagtgcaaataatgaacagccacctgcaacgggtcagtatcaataacatcacatataattagagtcaaacctccacccaggcaatccatgcctcccctccaaattcgtataggcagcagcctgcaagtatcccgcgaacatagtcccgagtggagaagcgataaagaaaagcgcaacccgccgcgtcacctccccgggcttataccacgagccgatgacatagatgacgccggtgaaagagcaagactcgcagatcccgatgaagaagcgcattgcgtatatcgtatttagattctgcgcccacgcacagccgaatgtgaatagtccccatcctatttccagagtcggcaaggcaatgttgatctgcgtgcgcgttaggtagtagcaggccggtatcatggatgtgcaatacgaggcccagaataccgcggttatgtagttcaattcgttgccgtgcagattgaggtcttctttcatgcctctattaggtgttagtaaggggggtctgttacactgagggtgtgacatacgacacataggcgttggtgatcgcctgctggtcaaggtatttggtgaagaatgaaaggcagccgaagattagaatcatgatatccagtttgaggaccagttttttctccgggtgtggcatgtcctttggataccacttggtatacgtaaggaaccggagccatagtccatcctgtagctctgtattgggttggaattcatggtcggatacctcatggatcgacttggtaccaattgcgcgtacgttctccatatttgagtatatttgagtcgtttgaacttcgtacgggatgtacagctggaagcaattatccaagctgaccctctgtggtcatttcggttgtgcaagcctcgataatggaagatgcgacgattatcacgcctgatggtgtcatctgtcatctccgctgcttcatactgcggagaaattgcgaatcgcggagactggccgagtctgatatgcatacctctcgttagtgacttgggaaattgaaactagcttatcttgaatgatcaaattcatcattaagaacgaaagattgtgatgttccagaggttgagggcccgggccctaagtatcgaatatagaatgaagatgaattcctgaactgctcagaactgacatgatgtgtaacgcttgatgtgtatcgatgtgaagtgaaaacccctaaaaaataaatgctcataatcatacaatgtacaccccttcctcaactcctaatgtcgatcttgtactcctcggcccagaatgtgacattgtggtccacagagtaggtttcggttccgaaactgagactgccaaggtagtcgtctttagccgggtaggtacttccttccaagttgtacagatcggtgatgagaggataaatgtctccagtaaacctctcaaggatcgtgtccgcgacccaggacaagactagctgtccattgtcattttgaccggtgtaaagcgtgctgatatcatgttagcgtatgatatatcaggtacagttcaactttcaactcacaatttcgttccttccaaggttctgttaatcactgggctcccccaaccatggggttgagctatctcgtctgacatccagaaccaaaccatgacctcgaatttcgcattagtttcgttcttggctttgtcggcatcggtatccaagaacatatcaatggcgacgttagtggcaagggtttcagctgccaacgcttctacatcggttgattcggcgatctcgtcacccactccatatgtccaatgcaggtcaagatataattcggagatcgtgtccatcgcttttggcaacacatcatcgacgcgaatattggggtatccgtggacaggcgcagtctctgggccagggtcgaattgccaggtgatggagaactcgggagcggtctgggttggataagtctcgttgacgaatgtcgtgacctagatcagatgatacattagtacgtccgctgtagaagtgcagatggatgttcgatgcgtacattcatgcagagcccgtttcctgttgatgttgatgtcacaccccattgatttgggttcactgtaatctctgtcagtcgtcgttcaagtcaacagcgcctgcgctggtaatccaagagcactaacgcgtgtattgttcggatttcgacggtggactgattccgattgaatgattgcagtactgggtgctcgacacgccattgttcgtgacagtgtgatgaccactaccgccgccgccagtgctgtcgctgccagagttgccgccagagctgccgccgccagtgctgatgccatcgtcagtgtcccccccggtgaatagaggtttctgaccattcgctgctcggtgggcatcaatacccattagagctccaacgcatcccccaactgggatgcccaccaggaccgcattgaccagtagtcctaacgcgacgaccatgaccaaaaacgagagtggtataaagcaagaaactaagcgagagtgcaaatgataaaggaaaagcgagcagcaagtacggagtacagcgagttagcagctgaaattctcggcctcacatcggaagatgtgaacgggtggatggagatgcatccggttagtctgtctagggcgatcgagaactaagcgttgaccacacaaatcttgttgataagaaaagggccctgagtggggtaagtccaggtaagcgtggtaatgatgtgctcatgacttgtatattacggggggattcaggtacaatcaggacgatctggtacttcaggtacagcaggtacagtctggtacagcaggtacggaaccacatcatttaccgatggcacttttactgcatttgaatttatcattggttcagttcagtggcaaatttatagatgaaaacatggaaccatggctagaattgctaaaattaccgaaaaaagaaaatagattatttaaagacccactttgatgcaagcaaaaattaccacaaactcaaaccccgtatgtaagaacctaaagctcagtgaaacttacgttgaaaatttcaccagaatctatttttgcggctcgggcctaaagcggccatgcacctcggtccttggcatgcactagtcccagggcttaaccagctggtcccttagagatcgctggtttcgtattcttctttactaggaatgtgagactttttctcttccatccttccattccagctcttcgggctgatcacactcgttttcgacgtttctatcccttccaacgctttcaatatacattcttcgcctttttgactttacataatctatagcctttctgtcgaaatggacaggcgtggtggtcatgacgaggacgaaaaggtagaactgaatgcctatcctgccaaccattcaaaccacagcttcgaatctcagcctttttcgccctcaccaataactccaaggcctctcactccagtcagaccgggtcatttccctaccgatgaatacgggcaacccgtttggcttcaacccaccgctcgaatgtcgggcaactccgattcctttcacaactcctcctgggacctacgaacgccgtatgattcccggtcggcttcaccaactctagttagtacagtccgtctttgtttctttggtctctttgttgtcggtatagatccagcctaaccggtttcccatacagtatcaaaacaatggagtgcaagaaagccaccagagtctagctcccctagtgagctccccggctcccccgggatttgcaaaggattgggtcaagtctggatcgattgctcgaattaacgaccgtgatgatgcggatacatggaaagggtggaagagatgggtatttgccctggtaccgtttctcacattcgccaacaccggaatctacttgttctacctcgggctgagaattgcctgcattatcatggctcaaaatgtttctggagtttcatatgccggagcttgggtttttgtggctatcgagatcactgttgcaatcccctccctcatgcacaactgttggactatgatggcgttgaagaagagaggccgtgccaagctgagattgaccggcaatgactgtccgacagtggatgtgtttattacctgctgtggagaggatgatgaagtggtcctcgatactgtccgtggtgcgtgtgaccaggactaccctcccgaccagatgagggtgatcatcttggacgacgccaagtctgccaccctcgaggctggctgcaaccaactcgctgtgaatcaccccaacatcatttacatggctcgtgaaaagatccccggaaaaccccaccacttcaaggcaggtaatctgaactacggtctggagcaggtcacccttttgcctggaggcgccggccagttcatggccgccctggacgctgatatggtaagttacaggtcccggcctacgttgaaattgaaattcctgtactgattgacaatctgcagattcctgaacaagagtggcttcgtgcgattcttccccacttgttggtggatcccaaaatggcccttgcatgcccgccgcagcttttctacaatacccctgcatccgacccgcttgcccagagtttggatttcttcgtgcatgttattgagccgatcaaggatgccctcggtgtggcttggtgcactggatctggttacgtcgttcgacgcgaggcgctcgaagagattggcaacttcccgctcggttccttggctgaagatgtcgcgacctccacactcatgcttggcaaaggatggaaaaccgcatacatccacgagccgcttcaatttggtaccgtgccggaagactttggtggacatctcaagcagcgtacgcgatgggcaattggaaccgtcgacaccgctgccaagctgaagttctgtctctggggtgacgccgttcgacagatgaccgctgctcaacgattctccggcttcctctatgcaactctcagtgtctataccctcctgctcaccgcttccctctttgctatcccgatcatcctcttgtggggcaagcgccttgtcgcctttgcgacagaagagcaactccgctggctgatctggtcctgcttcgccgccactatctccaaccgtctgtgtgaactggccctgttcatcccggcgggctataacaccggccagcgaggctcccgctatcaactttggatgtcaccctatatcgctctctgtattgtgcgcgccttcatcctccccacctggctgggcggtcaaacccaagccttcaagcccactggttcgctgggctcagctctgaacgagcgcgacccgaacaagtccaagaacatgttcgtccgcctgcgcgtgatcttactcaactacatggccagcttccaccttgcctttgtctacgtcaccctcatcggagtcgtcatctcctcttaccgctgtttcgcccagaacagtggcttccgagatatcatcctctgcctcatcacgcacgctttctggcctccgctcaccttccttttcatttgcacttcgctgtggaccccggtctcgtatgcgatcgacccgccacgcatgccagagcgtgaagaactccttacacgtgaccctaagactggtgtggcgcacccgacgaagaagagtaaaaagatcgccttcggtggccaggccgcttggttcgagcttgaatacacggttgccaccgtggtcacgattttggtcttcatctactcgtttatgttctaattttaagatttcctagtttggaaatctgtctgcatagctaacgtgtcacatgcttcaatcccgatcctttatcttatatgtatctatctacacctggggaatggcgtttaagctttgtgtctttccggtgtacaactactctgcatattcgatcttcgttatacatgaatacatatgttgatcaactccaaaatgacttatcgccggggctgtgtagtactccatgcataaatagtcgatacgtacggagtacagccttctacatgcccctttcggccaatcacctccagattggtctaagcgctggatttaatttcggaccaacgcgggttggctatctgagactttgacttgccttcagccaaatgcgccaatccgcgatattaattaattctgcattgaggcctgatagcccatttgccgtgtcaacggttatttactccctgctttattgcttatctagtgctattgattgcccacgcgtcttgatctgccatttattggacttgttctttttatagtctgcgcgtcaccgctattctgctgacgttgcttagccagagcctgtgcagagagcgacataacgttgaaagcttgactcaaaagtgagacagataattatttggactttctcttcatttaatattaatatcgaaagatacaagggtttgttactagctcagacggtcgtcctgagacttggtctttattggccactgattctctcgccctgaaacaacttcttggcgaaagaatcctcatgaatcttttctctttctgaatcttcgtcaataattagccaggttccatcgaggaacctttgttgatcccacaatgaatcatcgatgatgttggttcgcttgcaagcctcgcaaaagccgaccttgaaggatcgtgacctgctagttctagttctagttctagtctggcggcaatgccggaatgagtcatacgtttaaatgtggccatcgccattggccaatgtggcaatgtccacagtcttctctcgtggctctcataccccagattccaactcatggacaaacacttccatttaaggtatgtctaaaccgccggcgttgatcggattaaccccgaaccgctgacgggtcgggactttatcagctgcccgtcttgccagtagtccaggactctttgtgatgggagacgcctttgataggcttcagccactcggtccggtttccaccccggtcacctgatcggtttttaggtatatctcccgcagggaatggctatctgaatacaatcagcctccagccatgtcaccgggctcggattcgaaggtcgagatccggttatgcggcggattggattggtccacgcttcggaatccatgagatagttgcgattgcgatggctatatagaagagcagacgtctccgtctttggatttagttatagcaacgcaatcacaacagttttactatccaactatcatctctttcgaattgtattcacaatgtccttcctaaggaactacttcggtacctccgctgtcccggcgaaggaagagaagaagcccatccgtgccttgcccgcctcctggtacacatcgccggagatgtacgagctcgaacgacgctccatcttctcccgaaagtggcttctcaccacacacaagcaccgagtccccaagaacggcgacagtatcacatatgacgccgcgggctacgagttcgtcgtcgccaaagacaacaacggaaacatcattgcataccacagcaacgacctcttccccgcgcatgtgcacatcgacctaaacggattcgtctgggtgaacctggacgccagcgaaacccccgaggtcgcctggaaagacgacttcgagggcgtcgacgagcagccccggttcaagcaatacaacttcgaggactactccttcgatcacacttgggatatggcgggcgacttcaattggaagatcctggctgacaactacaacgagtgctaccactgccaggtcgcgcaccccgacatccctaccatcgccgatctcaactcctactatgtcaagaccaaggacggccacatccagcactacggtgcccagcgacctgaccaggtggccaagggtttcaacattgcagttacctacttctggccgaatgcttctttcaatatctcgtgagtataggataatatccctatattataataaacactaacattaaactcctagtcccaatttcttcttcatgcagcgattcaccccgaccagcccgactcaatgtgtaatgcgctacgaggtctaccgtcacaaggacgccaccgacgagaacttcaacctcatcagcgacatctacaagcgcatcatgtcggaggacaagtacctgtgcatgcacacgcagaagaacctcaacactggtgtctttgtcaacggccagcttcaccccgagatggagaagggtccacttcatttccagaagactgttcgtgatgttgttacggaacactttgctaaggaggaggctgcgggtcatcagatctggcctgcgaagcatgatcttcctgtcggccaggagcaggataatgctttccgtactggtgtgtctgactacaaggtcgatactttcaagaactctatgggttctgggctctctacggtaacggcgattgctgtatagagctggtgggtcgaatagagatgtttattgtatatagtttgatattgcgtcgcattgtgttgatgataatgattgtgaatggttttcttttggaattcagccttaacagaatggatatttcgatgttttgatatatctttgacctccaagtctgataatgaccagcctatactgaccaacttggaccgtagcaagtgtatgaacagaactgtaaccaacaaactattctaatcaaattatcccgctaacattacattcatttatacatatacattctcccaaacccaatcactcaacccaatcaacaaggaattcatccaacaaatcataattagtcctctccctctccctccgtccccgaagaagatcagcagcaatatcaaacttgggctcaggtctagagccctccttctccggcgacgaagcccgactgggaacatttatatgtcgaacgacatcagtgttcccttcaacaggcttagtactgggcatcccagactcagaatctaccaaatcaacctcaaccccagtctgtctctcagcatcatgtacttcacgcccatcgactcccacagccttgacaccaagcagcgacgagccacgcccagtcatccgcctaggataatgatacggctccgaagacgccggcgactcagacctcgcacggctatcactatgatcaacggaatcaaaactccgcggcgaccacggcaacctctgctcaagcgcatccttatcctccgacccacgctgcctacgcgcaccagcacgcccataaccacccgggtcgcgcgaacaatcccgatgctcacacccatcagtcaacaactccgtaagcaggacatttaactgcgccaagcgcttgacctgtctagccgggatcgcatcctcgggatactgtttcctcttacgggctccgcgcgcgccgattccgattcccatcccgattcccatttcggattcctgttcccgttcgcgttctcgttcgcgttcgcgctcacgctcacgctctcgactctcccgcagcccgcgcgactcaaaccgcggcgactgcccggcttccattttcagcgcttcttcctcgtcgtaggcgatcgcgggcttgaagccgatgccgtggtcggtcagtacttggttgaggtagttcacgcggctttcgaggaaggctacgtagctgcgtggcacttcttgttttgtgagggggtcatagcccacgcagcgcacttgggctttttcgcaggattcgcagcgcggaaggcgctggtcgcagcggtgtttgcggatgcgacatctgttgcaggcggagacgctgcggaaggggggcgctggggggtcggtgggttcgtttgcggtgggttttggggttgggttttggttttggtctgatgtgagcggtggggaggttggagggtttctgcgatttgttttcactgttttggagttggggtgtggagtggttcgtttggtttctagggaggaggtagtggaggttggggatgggagtttcagcattgtgtatagtttataaggaattgagattccaggagtatgaaatgaggattttaagagctacatggtaaaatcctttcagcaagattagtatactccttactccgaagctatgtactccaaatagggctaatatttctgatagagttcggattccggttaacacaccggagctcagttctccccgggtactccataacggaggtcataactccgagtgggggtttctttgtttaaaagggggatatataaagaggtcactaaagaggtggctatgtagagcctttatatatctgtacatagctcctttacccctatattctacttcccaaacctcgatatcgagcaaatcgacccgactcggccgaatgccacgttactggaatgtggagcagccgatatcaacccccacgctgaacgtcaaaacttccccattcggaattcgggtgagagaggtcgggtatcgtctcggcttaagacggaaagcaacgccattgggtgcatggaccactgcttgtccccgcattccttatatcttggagagcgaagtacggaagagtataaccgatctcgcatatctcggttatacatggtaagccttttggcgttcttccatataggattgtatatccgaatggaagaatgataactgaattctatatggaacaggtataggtatcttcacagttatggcaacattgaagtgacatcgttctagccctagatattctcatctcacccatttaaaggttgaatataagcttctgtacatactctcaaggaagcttcctccttgtcgatcttccaccctcttcatgtcaatcttccgtgtcaatcctccaatctagtcgagtataatcagctagcttcgccctattccgacatagttcaccttcctcaagatccacacatctatgctcatactcaaatcacccgaagtgtccaggatcggtcgatagtgcacctgtaagtgtaagaactccctccgttcactgtcccgacttccccccgcaatacccgaacactcgcacgatgtcagaccctcggtccctgtttcaagacaagccgtttaccattctgctagcgtagccgaagcacatcctccggtctaggaccctcggctataacaagcccctaggggcgatatcgtcccgagagtttgaccggcccaaaccgacagtggcccgcgggggaaatgacttgtacaccggcacgattgccgattaaccccgcgagcgagtctggtcatgagccccgttcaacaattcccgtacgttgtgaccctccttcaaagtgcttttcagacctcgatcactctactcgtgcgttatcggtctctgcttcgcgacggaatatgtaacccatcatatatatccctcaatcataacgctgatccggtaattcagggcgaagtggttttccggcagtatcctgaggcaactcctgacaaaactcagtcgggtcggtaccacgtatctctcttacatgcatatgtggttgtcgttgttgcatttccgtcccacgaggaacggccatgctagccgcagcctgccgtgttgctcttaaccgtctagctctcaagcaaacaagtgtagccattgcaactagtataggaacgcctggcccaacgctgagtccgagtgcaagctttgctatcgttgtgagtgctggcggttgatcggtcgggctgacggtagtatcagaggcaagggacgaagacaccaaagttgaattgtctgggatcgaagccgtggtctttactgtcgatgatctcctggttatgttgaaataggcagaggggaaaccgcctggcccagggttgatccagaagaagaatgtgggtaaataatccagatcgaagccgtagagttggacagtccaggtgaagttcgatacatggtccttttcgtggacttgggctggctcttgttagtctgggatcttggcttcggttcttccttgggcataccgtatacgttgcctcgagtgtaggcgcctcctcctaatggactctgctgccatatagatacgttgaacactggtaggtctgttttccatgcaaccactttctggtcaccgagtgcccaaactggactttttccgttgatgtagacagggttgatcatataattggtcttttcggctttgacggttgcgaggagggcagagagaaggattaagaggggctggaacaagcgtatcatacttttgatcttcaatagtggtatggcagagcttaaatgttagaacttcacgtagtccacgggtgaaaatataagaaaggtggtctctgacgagtggacttaagtaggtattaggggctggcaatcctggttaggggtgtaaccaggtacaaggctctgaggtagtctgtattgcaatgcaatagcgaaaaagagattatgaaggcctgggattatgattccagctagcaattttgagtgagaaacctgagggataagatagaagtgttgatacctatatttgcctcactctaaacgataatcagacaattgttaaaggtatatgattgtctctgaggtattcatgtttcacttcgtagtctccgcagatccagatacttggcagcataatcattagccaataccgggtcgcccgtaaggtgcataacagtagccttcttggccatcatctccgtctggcccttgatgtcctcgatttcctcgaaatgatcatacgccgagtcaatgtacccaagagcacggttgatgtactcctttctcgcagacgtcgagtcccgaccctgcaagctccacaactcacccgccatgcccatatttgcatccacgagaagtgaatacgcctgcgcaatgagactgaaattttccgactccaggacctggggcataatgctctcgactagttcgcccgtggcttcaaattcacgaagactcagcaacactgtcgctagtgtgcagatggattcccagaggtcagcgaggacttttgagcgatgtgcgatgttggctgcgcgcatcgcgagggagaagccgcgttgcggttggccggatttgccgaggatttgtgcttttaggcagaggagcttgacttgggagtggacgtcgaagttctctggttgcatggagtgcgcggcttgctcgaccattctcagcgcgcgaccatagtcgccttggcgcatggtgaagtctattgaataaaatgctagaagtaggcgcatgtcgaagtcacggagttgcactgcctggagttgggatataatgtgttcgacggccaccttgtcgttgctgtaggctgttaggaatagatctgtaagaagtcatacggttgtacttaccgacagatttgtcgtcgcaattgcagtagccctgaaaagaaagtccaggcgttgttgtatctgaaagctcggagcttctctgggtcgattttgttcatccgtgtgaatgcctccttgtaattgcctttctgtgccaactgtaggtgatgaatcagcatttctgtcatacacattcagaaaaaagttgacatactatttggcaatttcggaatgtgatcttgacaaagtcatcatgaggttggccctccgaatagcactcgcggaatatctcggtgttcagccaagcaaggtgtgtagctcctgtcggctgattagcgtcatcacaattactatacacttagtatcatacctattctagcgtacatggcgccttgtaacagcatgtatgcacccgtgggagttgaaccgccctttgtcacattgacgtgggatgctcgcacgaaggtttcgacaattgatgcaaggctctctccctgctcatcattagcatcaacttagtcaaaggaaacagggatacttacttgctgcatctccaacttagcctcgctaagtaatgttgtgctcatgagagaccacatgtcagtctccttggacttggccttgaggaaatcaaggccctctttctcattacccagcatgccactgttctgaacttcccgcatctgctcgggaaaagccttgccaaagtgatacatccagctcatgcagaagttcaggcagttcatatcatgagactcgcgagcaatcgctacggcctcttgcacggctgatatagcttcactgaaacactcaaagtccgcttgcatgatagccaggttcagaagggcaaattgataggcactgcggtcgagatttgcgtgcatggtgtagtcaaagtagcggtggagattgtcaaaggccgaggtatagtctccagccctccaggcgtcaagatatctgtcatttgtcaatcacaatgtacctcgataatgatgtatgcaagaacgtactccaggtaatacatcattacagggactgaagactctgaggtcatgatgcgtttcagctgagccctcatttcatccggaactctacctcccattcctgtgtctgtcagcacatggtcatgacagccggagagaattgcatactttgcagttccccgacttggaattcgatcagtcgctctgcatccttgacgctgacttcttcctctccatcctcatgatcttcgatgtcaccatataccacctgtgaaaggtagctggttgaatccagccccaggtcgcgtagattaacatcaaccgcgatttgatcagcctcgggatgtctgcgactccagtagccgtatgtgggtagacggtatttgacaaatccggcccagagcttcacagaatcatggaactgtagccgcgtgtattcaagataagctctgcgtacgaacgcaccaagtggcgagctcctagacaagcgcatgcgatcatcttccactggtggaattccattatccctgtcatggatcaattcgtcgcgtgatttagccaggagcgacgggatgacctcgccgaagaaggtttccagcgcatccagcgagtcgatggaccagaggttcttcagaaacaagtcccagagtgtacgcccaggaacagaggactcatggcgagacaggcattcttcaagctctgaaattgtcggcaggtaatgctcctcccattgcttatcggcggcatctagtgggaacagacccgccgtgaggaacgagaggacggcaatagcagaagaattgggcacgacgccttcagtgtagagggtgaccagacacagcaaagagactctccagggagtcaaataacgcgtcattttgcctttgctatggctgccacatcttgctgtgttctatcacggtattgttccaagggcgcgcgtgttggataattgatcgacacctgaggctgcaaggccgcaatgcgggacagtacttgggaaaaaaaagatgacgcataattactttccaactcaccaattgaacgatttcacaatggctcaagctctgacaaccatagatctgcagggtgccttgcctcttgtcgccagtggcaaggtccgcgacctctatgaaattgacgataagaccctcctcttcgtcgcaagcgatcgcatttccgcctacgatgtgatcatggagaatgtatacaacaccacaattgcgtaccagactgcttgctgataccgtctacaaaatagggcatccctaacaaaggtgttctcctcaccctctgcacgcaaacgtggttcaaggccctgaaagaggcaaacccctccctccgcacccacttcatcaccctcgacctcccacctcagatcccggaatccctccgccctgttctacagaaccggagtatgcaagtgcgcaagcttcgcattctccctattgaagcaatcgtccgcggatacatcaccggctcggcatggaatgaatacaagaagtccgggaccgtgcatggaatccaggtccccgcgggtctgcaggagagccaggctttccccgacggtcccatctacacccccagcacgaaagcagagcagggcgagcatgatgagaatattcatccagatcagggtatgttcatttcgaatctgttggtttgagatatctatactagatatattacacaacgagaagacctcacctaacatccctcacagctgtcgccatcctgggcgaaccctacgcctccactgttgccaagatggctgtggagctctacaagacagcgcacgagtacgctctcgcgcgcggtgtgatcatcgccgataccaagtttgagtttggagtcgacgaggaaactggtgaggtcgtgctggctgatgaagtcctgacgcccgactcctctcgcttctggcctaaggaatcttacgctgttggtcgcggccaggctagcttcgataagcagttcctgcgtgactggttggtcagtgagggtctcaagggtaaggagggtgtgcgcatacctgatgatattgcgcttaagacggcggagaagtaccatgaggcttgggagaagctcacgggtggtaaagtctaagtatatgatcaaggcggttatggaggggtatatatgattttagtgtagattttgtatttgtttatgattgattcgagacgagaatgaaattcaagtgtcatgtccaaattgtggccctgagggtgtagtgggaattattatacacatagttttatcctgtcctatatttactcctcccattcagacttcaaccccttgagacccttcttattcgaatccccatcctgctttttgatctcttccttgatggacttcaccttggacttcgcctcgggttgattagtccaaccagagctaacaccctcatcaagaggcagcgcataatcaccacaaatacgtcgctcctcttcaatctccgcctcactgatgccattcgtggcccaaatcttatgaatgcgtagatcaaagggaccctcaacacggtccgtaagaccaataccaatactcttaacacgctgccgagtcaaagaagtctggggctcaatgacaaagccgtgattcgtacgcacaaacgagttgaaaggcaagagaacggtttcccatccatttgagccagaggtcgttgtactggtagaggtagaaatgatcgtcgattcaggtgggacgtccgaaagcgcagcgggcaagccgctagggtatagctcctcgacatcatcgggtgagtctgcttggaagtcatagtcctcctccgattttggtgtgtcgcgtaggaggtggtgtcgcgtgtatagtctgtgctggtgaatatccgtctcgacgaccgcgtctgtctgcacgttgacggtgtatcggcggccgtcggacttgatgcgcagagcaaggtatgcatagggatcaacgtcccagtaaagtcggccgaagagccagaagcctcgatcttggttgcggaacgcggcatagcctggttgcgggtattagttaattttaatctttaatcttcattttcgtgctctagatccttgtctgtgtcgctaattaggcagctggtagataacataccggttctttcgacgcgccagttgtcaggaagcttggttgagatgctaccgtggaagcgggcatgcgcgggagtatttgtagaaggttcagcgggttcgtaatctaggctggctgtgctaaagcctcctactgcgcggtcggccatggtcttgcatcctgtaacagtgccctcgttttcgaaatccaggaggacataaggtttagtcggggtgtggagggcttctgtgttccaagctgcgacagattagttgagctgcaagaatgacgacatacaacttaccgatctttgacagacggccgaattcatcggcgctgcgcctgaagaatccggcttgggctaaacgtcgagttggaaacatattggagtaattgtgaggataggaagaagctctgacgtgcctggagttgcttaattagctgtcggcttccgaggtggcgtgaacggccgataagataagtgtttggcttgtttgtctttgccctcaacttcttttatacttcagtttcattgttcctaaagacacatgggaccttgctaactctacattctctcgatcatatacacgtcattatgttgcaaatttactttccagggattcggaatttgggatttaagagtcacgctaggtgcacaagacatcttgaagacttgatcatcttttgtctctgttgagctttgtactcttgttattgaatgcaatgtatctgtcgatatctgacgacattctgatcattccgcatacttcgctaggcacatacctgaatcggttatgatgcgtattcctcttttgggaaggacatccaaagttcatgaccaactctatctgaagagtcatggatcatatgcgcgataaacctcttcatgagggcccagctctgtctttctcctgggcgtccggctttgaaccagtggttggactgactagccctggtaatgcctgattctgagtcaaggtcgctgcataggtaccacctaggcagtcctgcgagggctcccccggaaatataccgtggttagctcatatctactttcctgtgctggggtagcctagttctggaaatcggatatttcgatatttatcccaaaatggcgacggagatggtgttgatagaggatatcccacgtagttatctcgatatctctcttctcttctctatacattcataccacgctcgtttaccgcagttgaaccattcgtctattgcagtacaaacatccatttactctcgttgattatataccgccgcaatggctatgcattacgttgaacagaatatttctgcgcctgtctcttggtatagtgccccggagcctactatcatatggcaagatccccatgatacaggttcggaatctagtgcctttgaatctggtagctcgaagcctagtaccccagagcaacctgataccaggtcagtcgagccatttaggccagttgagacagtccaaccagttgagctagtcaccccaaaagaaaccaagccaggagacaaaaagaagcccggagagggaaacaatccggtatacatgccgcgtgaagaccgactgaatcaaacaccgaccaagggaaatgcacagggcctctttcttcctgcttgttgtgtctttgtgggaaagtaggtatttctcgattcaatctgacactgtatactgactttgaatagcctctccatcaaggtttctcctgaaaagttggaagaagaccttacagaaatgatctctacatttggccggtgtcatgttaaaatcaaactatcccagggcgtgaagaaactgcctgttggatttgtacagtttgaagtgagtacaactgtttgatacatgagatatatatctcatatggtatactgacatactaaataggacaccaaagcagcaaatgctgcattaaagcaaaatggaaacctgatgcttcataatcgggtgttgagattggaatcatccaaagcaagacgtgagtgttctttttattttattggacttcatctgctcaacaccttttgcatcctgcaccctgcaccttgcacctttccaccttcgcactttctcactttctcaccttctatcttcacaccttctgaactttttgttctccttaggaactgccaacttcggtcgtctctctgatgctcccgtcgaaaaagctgacgtcgttgctgccctgaggggacgtggtagcctcgagagcatagctattgagcacttcgtcaaccaagacggagaagactctacctttggtgttgtgactttcgcataccccgacgactacgcagatgccctccaggtaagtcgactgtccaagtttgctttgactccactaaccacttgaccattatagcatttccaaaacaatcctgattactatatgaccagatccaccatggatcccaacgaccagcttcctcaggattaccctgcaggacacaggtcatctaaccagcctcccgcaaaccgtgacaaccagcagcgatacaacaacactggccgcagacccttccaccgtccatggtatagcggcggcaacaataacaacaatagaggcggattccgaaatgctcctggtcctgcccccagacagcaaaacatatcctttgcaaatcatggtcacagtcaaagcttcaatggccagggtcattcgtctcacggctctttctctcagaactactctggcaatggttaccctcagaacaacttcaaccaaggctatcccagccccaaccccaactacaatcaaaacttccctggcaacaacttccacccaaactatcagggcaacttcccgaactaccccaatcaaaacttcgtggctgcgggtccctttcccaatgcgccagttctgttcaaccaaatgcaaatgcctgaaggcccacccccgccatatcatgccgagtacactgctatgcaaaacccaggttttcccgtgttcttgggcaatcaatcataccagcctcccaatactcttgctccaatgatgactccggttcaggctgttgctggtcctgttcctggcgctgttcctggcgctgttcctggagctgttcctcgtcgccggcgattgccccctcgtccagactgtcccttgattgtctccagccagcctcaatttgacaccgaacagcacctgcaactctactatgagccctatcccggtaacgaacccgtcgtgaatatgcagccaggctggaccggtcacacttgtttcgtgcagcctgactacaaccagccttgcccgcccgacgcatatcctcacagtcgccaatctagcctggaaagtcagcataacacctgttcgccgcccagggtcaatgaatccgagtcaatcttgacccagactaaatttcacacccctgaggtcgagagaggtcgcccactagttcggccgcgccatcccaacaccgatggaggctttgacacggctccagtgtctgctcctgctaaggctcagagagactcatcctctgttaaacccctggatgggtcctcaggaagagccagcaagtccactgatgctcaggttgagcccgctctacctatgagaaagcctatcaagtccgagaacaaagccaccgaacctgagaccgagctcaacccgcctcagcctgaatccacctgtggtccgagtcatgatgaaaagaaaaaagaattgatggatgaaatcaagccaccgttgagcattgataccaatgaagaaagcgcagggtcctcctccgaggccggccctaagacaccagacacggagcagtctcgggaaagcgctaaacttcagacttcagccaaagctggctcggtgaaatctgccggtagtaagacccctgatagcgctgaaaccctcaagccagccgacaagggcacttcggacaaaggcaaatctccggaagtggccacatccactccaaccaagagtggcggcaaaagacttgagcccgcagtgccagacatcaaacatctactggctcgccatgctttccagcatcgcaaacccctcaagaaaaagtaccaacccaagaccgacaccggcaaaacagttgagcagtacacccgtgagataaatgcgcagcgtgcctcggttgacccagactcgcgtgtccctgaacatattctgcaagaggtgatccaagagctagagaatgagcgcagagaaaatattcggaagagtctcggtctcggacccagtgctaaaagtagcatggacagtggtacttcgaagaagaagtaggtgatattgcagtgatggaaattatccaattcgattttcttactatgatggggcgttttattattatctctttcttactcttttgtccatgctggctatggtttgttctttctttattcaatctgtgtgtctgcgtttcaaggaaaagaaaaaactacaaaaaaaggggagcatggacatgctcaagtcaagtaccaagtatcaattatcaaatttcaaattttattctgcaaccttgctcattcctatagtaatctaatgtatcgtattagttctagacaggggtggttctgattctagccatcagccctatgtggccgtgagtatgaatatataaggtaaaagaatgaagtagctcatcgatgataatatgataatatctgagttgattgatatgactgacatggccgaaatggccaatatagcaacttgatccccgccaatgtaaacgccgagaccgaaagaaagccggtttatatacacaaaatgcttctcgatgccagattgcatgccatagataccgaaaccgaatgccagtgggggataatgatgcacgccgaacagaaaaaaaaagaacaaaaaagaaaacaaaagagcaactttccttatggaaacgctgatggatagattagatgtgggtcgtgaggatagagatgatatgtatgctgtgatgggggtatgaggtagacaagtagagaggggaggggaggagcggagaggagcggagaagcgatcagatatgaagaagataacgctgggagtaaaagaggagagattaagtatgtataggagtgggaattagtgcatcaagctctcacacgcctcgcgtcgaagaagccaagattgacggctgtgtcattgacgcccaggaacggcgccgcatcctcaagtagttcccaaggacggacagggtagggaccggcaacacgaccgcggcgttgaagacgaagtcgactggccatgcagttcgagtcggactgtccggtaggcaagcccggtgctgctgcgacggctgttgaccccagtcctgccggagagggagctgagacttgctgggaatttgcagggtattgttctgaaattgggcctaggaggtagaggaagcgagagtcgttctgaaatggagcgaaaaatggacatttctctttcaggaaccgtgcacactggtggcggacttcgtctgggaagatgtcgattagcgaggcggccacgtcgagggcgtgggtctgtaggaggattcctggacagggacggaagccttcggccggagtcggatgcgggaagtaatccgctgcagggaacagacgaaggacgtctccagggaggctcgagagtgcgatgcagaatattgaggtcagaagacggagctgttcgtgcagaggattgatcttgagagctggtggcggttgggcgaatgcggaccgatggaggacgatcatcctcagcaaagcagagaaccagaatgcaagagctcgctcgaaatttgcacgagccgtgttggccacacccacacccctgagggtactgttgtgcagggtgatgatcttgtggagaagggcgtccatcttttccacgagcactggagcgacagatggagctccagaatcggggatgctactcgcaagctcttcaataatggtaagatacattttggctgtctccaacgatcccagcttgtccggcaaatcaggaatatcacctagtggctcttcaagcagtgggatggagaagaacgccttctcggcacgttcccggatttggcgtacggcgtccgggctcatcagtgcaaccaggtcaatccaatgaagtctgtgagcacgacagtctgatacggcagtcttgaacatggcatcaacaatattggttcggtcttcagaccctgagtccgcatgaaatagaacttggagcttcaactggcaaaatggaagcgagaagtcatcagtcatacgggcaagcttttcaaccttcgagaggactgacttgccgtcggactgtgactcgatgcccagtaaaaggtcaagcgctttctgcacaacacccaaagcggctgggtattggtcgatgagcttttgcatgctattctgtgccgcacattcggggtgtcgcacaagaagatcacgtaacagcatgaccatagagtgctccagctcagtgtgcccggtgaaagaaccaacggcattggatgatgcggcgtcgcaaacaatcttgagcgcttcctcggagtccttattgagaaattcctgctgtgctaactggaaccgataggacaccaaatcaaaggacttgctatcttcaccagagacaagaagttgcacaagttcagcaggcagttgggctgcattagggactattgctggcttagagagtgcgagtctttttgcaagggccaagaaagctctgatagtaacgcatccgacaccaattagcggcgggagaattcgcagcaatatggtacgttccggagatcgcaaatgaccacagacccaacgggcgagcatgccatcaaaatgctttggatggaaagacctgagctgcgcgagataacggcaggcgtcatttgctgacaggttcgtatcgccattatcagactccaaatgttttatgagtgtagtgaaaatggtgtccagagtgggctcatccatgacatttcccgaatgcaaaagctgatctaacttctctcggaagaaggagtcaacgccatcaaaatcatctggaatgtgatccgacactggagaagatgcggccaccattgacctgttctccatccgagagagatcctggcgaagaatggatacagtattgagttcactcgggatgcgcaaaccaagttcaatcagagagaatatcagatcaagacttggcatgccaaacctcttcattccagcgtaggcatcaatgagtctccggaatagatcagttgtggcgccaattatgcaaagagagtcgaaatggcagtttgtggtatctgcaaccgaggcgagaacagtgctatcaccacaactagatgcaaacttcaacacatctgctaacattgaaatgtcgccaaatgtttcaagagcatcgcggacagtgtaaaactcggcgggagtcagcgcagacaccacagaggtattgccaatgggaaacactcctctgttactttagagttagtaagataattgacgagattaggaggaaaaagcgaatgctcactctgtgctccggttgtgttccgcaactgctctccgtaaccactggccaacatcggcttttacagcccaaggcaagtttgttggtaatgattcgaattccattgacgtagattcctggacaccgaaaattcccggtagacgttggctgatgatgtctttcacgctttcgatagctgcgttctctcctgaagcagagagcccagtacgattcagcagagtactccgcaagttcccaacatgctccggaagacgagcaacagggagttgtgctatcagtccgatatctattggtaagttcttcgcctgtaaatctgttagtgaccgaaacagtttgatctgtaaaatcgatcttaccttgggatcctcggctgaagatgatccattggtaacgcctcgtgccatgagccattgaagatagcggccaacagagaatgtctgtgacctgacaagttcagagacgacatggtagatttgatccacgttgagcttttgattattctgtccgctcgatagaaaggccagtatgtgactgtctacatcgacgccggccaatttccatttacggagcaggcgaacaccaatgtaaacccgacagagaccgtagcggaagggcgtagaaagccattccaataacttgaagaccaagacagccttgtcatcaaaagcggtgagatagtcaaatatagaagggagatcatgagagaagcgtatggagtcgagtagtcggacgatgtgttgatggggtgagcgctgggttgtctgtttcgagtgtctgggtcgttgcactcgcgcgttgcgctccgcgaggctctggaaaagagctttttctgcttcgttacccaaatcaagggcagataacacctgttgtttatacgtatcccaagaatttgggagtatcatcgaggaagtatggtcaagaacaagctttttgataaagcgaaatagacgatcgataagaggttgaagctgagtcaacttagcttcagttgcctattgctaaatgtcagtattggcgggcaccaagtagttgcaagttgaacacacctgtcgcactttgtggagcagcagctcagccaatcgtcgtccccttcgccgatatcgcatgatatttttccaatatatgccgagcatcaaaagccagattggaatcgtgacgatagaagcagcctcaaacgaggacaagaaccattcaaggaaatggtcatggtccagtaaattttcggaaaataaacgagcagtcaacccgactctagagataaggttagcatgctcatagtcgacgcaaatccaagggcacgtacgcatatgtcatcttcgccttccaatccggagacttggtggcagtacatactccttcaacaaattgctggacattcgtcgtccagtctcggacccattttgcctctaacccaacagccaaagcaccactggtgccttttcgtttgaaggcacgaatttcattcgcacccacacattttgccaaccaaacagcacgtgcaactggaatacatttaccaaggcactggtccaggaggaccttgccacggataccatgggggatggttcggctcaacctccgcagtggaacagatgggttggcgagatctcgaagccatgcctcacgcttgttatcggtgagtgtgactcgaggcggcggtttaaaagttgacggggcgtgaatagtgttgtgactttgtcgtttctctaacgccgcagcgaagacggacgaaagcatttgtaaccccgtgcgattcttgagctgcgcatataaggcaggacgcgctgtattcgattcattctgcgagacttgtgtacggtcataatacccttgtttcgtggtttgctcgctcaggacgtcctccggatggtttccggtccatggggcgaagtcggcgggttctgtaacggacgattagtctccatagttaagattcagggatctggggtcgaattactgtgatctttgtataacggtgcgacggcagggatctcaatgcgatacggggtcgtttgtacagccccgacgggggagctttccctcgacttcacagtggcgcttccctcaggctcgggcacaaaattgttcatccatggctgggccggtaacggaggcggggacgggggtttcagtgcagcgccatcgccccgattctcattgctcgggatttccgacacgagagcctggaaggaccagacaggacggccgcgccacgaggctgcaggtcgcgagattacacttccggggttgttcttcgtttctcccaccgctaggccagtatccgacgtattcgacctgctcgggacttccagtctcggtcttttcgggggcggttctctgtcttgcgactcgggaccacctgcggtcaagtcaacgacggcgggttgtcgaattggcggttggggtagtgaggctgacctattgggctggtcatattgtcccaacatctgcgcattatcaacacgtccgagaccgccattgaaggttcgcagagggtggccccacggttggccgccggcagaggaatgggggatcatcttaggttcatgatgtatccaaagggaggattattcgggtcatccaggcgatgttcggtttcgagggattcgagtcaatcttggaaaatgggtgtaaacgcgcggaattaggtggaagtcgggttagggtgagctgatgtggaatcggggaatggccactcgggtatctgggtatctggatatctaggtatctggggttgatcggggaaaacacacaaatgctaaatgagggaaaggatcaatagggttgtacggagtcaagtacgactggagaatatagtatgtactctaagtcgagagaagtgcaagagttcaagcgtccaaatgtttatcatatgatttgacgggtaatgggctgacaataccaacgtggacctgcactctcgctcatttgcccttttcctgacaatcgcaatatctcgggattatttcctcttttcttcggtctttacttggtaaatatccgagtcgtttacgtacagcgctgacatttccagggcttcttattgcctatatcgttttgccttctgtcagtccgtccgctcccggaaatcgccctatctggtgatatgcctcgccggcaagatgtcttagccgcgcgattactcttgaaaccccaatgtggactattgaggactgttggaatgaacaatccaatgccaaactacccatgatctgtcacaccgtaagtccaacgcaacgggccgttcccattctctctcggtaaatccccgaggctttccaaatggcttatcgccggagctccatgacccgtggacattccgcagggcgcgtatcgggtctatcgggtctttgcatctccaatttccaatttgactctgaacccgtggcatgtttgactcggggcttaaaggcaatgcatgtgccgatgtatacccatgtccattctatgaaacaacagcgagaactagaatatgctaactgcaagggattcgttgtaagttgtagactacggagtccgctgtaccttgttatatatgttgtaggaagtgattaatgcacagccatcacacttcatgcagcatacatatctagaccatgacacaaaccctgtatgatgtcggcggatttttattcgtattatcttcggactattccatttaaagccatctgaatgactctatttcatatgaatcgcacgtatgttgcacattgtacattatagcgatatgtcaacaagtgtttatctagcttgacatattccgatccctacgtacttatccgttcagagaagatatggaaaatacacatgcataaaagaatgaagtactccgcacacaaaagaaaaagcaaagaggttgtccatgctccagctcggagatattcagtccggggttgttctcggaaagtctagcccagactggcatcgccttggcacccgtggccgaccccgggggggccagttcgatccttctggttaactcaacccatccccttgatatcatatcccaacacaatgtcgtcaaagaaagatatgcgcagagctgatctcggtgagtggaagaggaattgcttcgagccttggctcatcaaaactaacgttgaaaagtgatcccctacgtcgatccacccaagagcagcagcgatgcagatatctccagtacgcaccatcttcgttgtttcgacaatggcacgcttcagtgcgaggattatgaaggctgattgagctatgcaacaggcacaatgtcgagcactatgcccatggcggctgtaagttgtggcccaacatctgaccttgcgataacttgaccctgacctcgatctttcagatgtttactcggaaccggtgagtcgcgcatcttacacgagttatagacagtattgacgaatgtcgcaacacagcatgatcggatggtaagagcaaggcgagcagtcaatggtttggctaggttatctgactcggaaatagggtatccttcgtcttctcacttcagtcctggctgggtgaatccgcagagcagaagaagactgcttctacaccggcctacatgtcggttctcatgtcctgttcgtttctctccgtacccctcgtgtttgcaggactaatcttatggcgcgttatagtgatggcattggttgtcgtatgttttccgaacccactaaattgcgatgcgcccagcttaacaacccctttcagacctatttccctctcttcttgcctccgcaggctccagggggcaccaccggtgcctccgcaccgactccgctggcctcttgaacgcccgatcctccttgatatccacccacatacctatcataatcttcacgcagtcttatcatgtgaaatacaagaattaattgttcgcgggtcatcggattccaagtccggattgagagatctccacggttatctattgctgtcacgatgtagccatattcaagccgagttctgcccttgtgatcaggaatcagcctgtctccaccatagttgccaccaattatttgctagtttaaaatagatattgtatatgatttccccttaatatgtagttcttgcgcgctcctccaggggggcttgatgcgcgagaatcgcttagtcatacaccgcctaccccacaacgtgacccttgcctcaaaaggctctgccacttcttctctcgttcttcaaccacagcacctctctcctaaccacgcacgctccgatcttttacagagatattgaatctcgtccttcgctcactccatcaatacccattttaaacgccgtttactacgaaaaggccgagtttatgtccatcgaaaacctcaagaccttcggtaagttcgccaccattcccctcctgagcgcgtatcgggcttcaacccccacccgcacgcatatccacagctgtgatgactatgtatgcggatggcgacatatgcctttcgtcatgtgtagtgcgcgctgtatatttcagctctccccgcctgtgttgcaccgagtctcacgacggcgggggagagatttgatactgggctgagactgacatgtgcatattacagaccccttcgccgaagccgacgaagataccggcgagactaagcagtctcagaactatattcacatacggattcagcgtacgttcactctcctctcctcacctcctgtcctcaccgcccatggctgctcttgcgattgccggcgcttaaagggggggcacatgctaactccttattccacaacagaacgcaatggtcgcaagactctgaccactgttcagggtcttcccaagaagttcgaccagaagaaaattctcaaggtcatcaagaagaagttcggtatgtctcgtgacctatgcatacgtatgtccgggtcaaatgctaactatatcctagcttgcaatggcaccatcgtctctgacaccgagatgggcgaggtgattcagctgcaaggagatcagagaaaggatgtccaggagttcttgactgacaaggaggggctcgagcttgatgccaagaccatcaaggtatgtcgctgccccaatacgtcctccgtcaccattaccagttctaatctgtcatattttaggtccacgggttctaatcccatcaccaacatcatgcctcgttcccgtcccctcttcccggtttatgttgccctgtgagcggtgggataggaagcatcctcatccgccggccgtatacaatatacatactggccttcacatcgatcgaatgtcttgctttctccccccaccactctgtgcctggcgtgttagacctgggcccttcgtcgacatgacccgctacaccagtgtgcccccgcctatcgttgtcacatgattagcagggagcggggtggatcgactgctattttaggacgggattatgacggaacgaggagttggtagatacccaatatctgcatagacagacaacattttttttatcggcttgcgtgttttccattcttttatccctggagaaggggttgcctttgcttgtattgctaattaccattgcattcccatggtcaattttgtcagtctggctaatcgaggagatccaggttgaactaatggcgtgctattgctgaatcgttttctcggtctctaccgtctacttttaatatttgtgctgttctcgctctttgttcttgcgacaaggaaattgaactgttctcgagtatcatcctccagctgatgcagcaacatagagtaaattcgagataggaacttgctctctcagtctatgtttaagagggtgcgcgttgtgaatcaatcaataaacaaaaataatagataagatctatcaaagatcgccatgtctgaaaagaaaaacttccctaggccaggggtatcaagcgcaacaaagtactcttccagtacttttgctaaatcaaaatcacaatcagatcccaaaaatgtacaaatcatgcagcctgccagccaataacgcttgcccaaactgtggaaaccaactctgcagaatatccggaaacagaaaaagcaacaaaagtccaacaaccaacaggcaagtaatcaagctatagctctcccataggaatacggtcatccgcaattcgcatgcgcaggaagatggccacagcccagtcccaaagtttgcgggtaatgacgaagacaggcacttctggttcgttttcacgggtcagatgcagctgcatgaggagcgaggacatgcttaggaagcttgcgacggaaacgactagtagcgatgctgctgtttcgcgtttgatggttgcatggttttgcgttgcgtggtaaacaaatgttaaagactaggcgaagggtcagtggctgttgcaaggtcgatgaacaattggaagtcaatgtaacgtacggttgttatggagatccaggctggtaaaaggagtctagggtcagaggatgcaccagataggtaaaggacccaagaagtgatatatgcaatcaaaccgttagttgtaagaagacgaatcacaacggctggtggtgtgtagtttaaaagcctgagtatatcacagattagcattatggacatagtgggacgtcaagggttgagaaaaccaaccaacgggacatcatgcaatcagcaaagaaataggaaagatatgcggatgcacagcactgtcaagtagtcagtataagagtaggccgttggaggatagcatatcaagggaatacatacccacataatagccaatgccacctctgtcacacgaaatctcctctcaacatcccattcctgtccaacactaccaacaatcgccgccgcccacccctctcgtcccatacccggccttatatgcagcaattcggcgaggaaggtaaaagcgcatcgcaaaccccaccaggcagcaggaagcgtgctcagagcccgacataccagcaggggaatataccacctgcggtccactccgaggatgacagcaacccgcgggtgcagtgctgacttggggccatcgctgctgggtggagtatgggacgaggaagtcggggaaggcgggacagtcgaagcagatggagaagccacctctttaggcagtcggctttgtagtagttcgggggaattgctgaggtagctgggcggacgagccggtcgcgtgagattcaggtctggagcacggtgtggatgttgtggatagtctcggggggtgtatggtggaggagaggcattacgtcgaggaggagccagcctttattctgaatcgcggcatatgcggccgccacgcaaggaagggaaggggtataggatgagtattacaatcgagtcgtgagctctcgacaaaagattcaaaattgggttgttgtcaagccgtttgcgagtcccctaattggcagatatcagaccccagtgtgtggcgggcggtgtctttttcggaggcagtttaattttatatgctcgacttcgttttacatatgacagtgggattgaagaaacagcgaggaagatataagctgtagcctcgataagagggcgcttcgttcacaagagtcccggggagctacttgttgctgtcgaccgcagtgattcacgtgactgacagttccgcgggtttcattcttcggcgaggaaccacttctcttactcaacctgcattgcaatggcgtctaccataagattgcccgcgggcacatccgctcggattgtcccatctggttcctttgtacaatgtcgggccttctccgagacctcccaacaatggcgtgggagacaaatgaacttccgtcctccaagccaagtgcagcccgccttcaaaaccagaacccagggcatgagaatagccgatctgccaaatgatatcggcatattaccaggtacttttgtccgaccgttgtggagggacatgccttcgattttcaaggcaccgcgtgataggtggcatatggaatggacatggctcaaggcctggctgagcaaccatgccaggttagttatcctcgaattctcggactgctcggtacgctctggcggttacgctgatcaagagctgcttatgctatatacttacaaagatgtctttcctaactatattccagtctgctccaatactgcaagcgcgaaaatacccttcctcttctcctaggcaagcggcgccatttcgccgcaaagcttcataatgatgcgtttacagcatttgccgagtaagcatgagtcttttctcccgtttaattttcagcgggactaaccgctatgaattgttatagaggcaacatccctaaaatccgccagatctgctgcgacaatctcgccaagaacctcagcacagctatcgaacgccgcccaaagaatgagcatttaacctggaaactggtgaaatacctgcgtaagcccagcacaaacttcacgggtctccgcgtcatctcagatcgcgcaacatccatccccgatatcccgaaatccggcattcgtcagattgtcgtgcgcatcacgagccgacaggctacgactcggacccagaaagccagcgggaagggacctacagaagatgtcaccgtcgacaagaaggagcaggactgtaccgagcacgttgtcattcagcatctccgctggaacaaccaggataagggctggagagtctggggcaacatcacccccaccacattgcatgatgcttggactaatccctacttcatgcctgggttgtcggccctcgagcgtctggacatgatcaaggactcgatgggcaagaaataaatttaagtcgcatctcaaactgtgatttgtatttctttctgtcagaatgatatctgcgcatttggaagactgcgactataagatccgcacagacgagactatgaccggccaagggttttctgacctaccatttcattcgatcaacagcgaatgggtttgacagaatatcctttatttcaccttcttgtctaacaactcctcgtttgggcctaacattggatagaggctcaggtcagcttctcttctggtccgttctcttcctcgccacggaaaacccttgatatagaagcatttacacctccctatgtaccatagccacctgttttgataaattctacctctttttgagccgttacctgtataaatgaatatcaatctctcaatctccttcctgtgacctactactttccctaccatgtactctctggatttaagcttctttggtacgattgccctgactctagaacaaataccaccaagaatatgcggcgtcctactactggcagtatactgtatactttctaccaatgtaataccaaatacgccaatatatgcattccaacctgacatcatcggtaacacgattatacgttgctaaagtcaaaactaaggactagccaggatgtatatatacaatcggaaggcacaaaagcagtttttaacgtgtagcacaggtatcactccaagaacacaagaacaagaacaagacgtacgaatgaataagaaaaagaggtacaagagagcaccgggaagcgacgcatcatcaaaacattatacgtgggtccgcggaccaacgttcatatcccaataaagaaacaataaagaaactaggaatgggccgggggcgaattgatctaatcgtcgtcgaagatctggaatgtgttattcaggatcgtctcgacgacacggacttgccatgcagcgtcggcgatgctgccgccggaattagcgcccataagggtgggtctatagcgagagttagcgagtctgtatctgatagcatcctgtttatatatgtaggatgtggactgtgcaaggacatacccgaagcaaatggctagattgcccgcgttcatgcggttctgggtatagtgttcttggatcttgttgagatgctgtaatagactgtattaatatctgatggaaatagagatcgtgttcttggggatcgtaccagaatgatggcccggagagtagcatagtgagcatcgggcagactgttaataagggcgtgcatcgagtctcggcgttggatgtcatcgtcgaagcctgtggtttcattgtcagtttctcaatacgggattctcttcatgacgtgaacgctacttacgggcggcatcgacaaactgctgatagaactgagtagtgaacagagggtccggaaggtccctgaagaattgcttcacaagtcctgcaacactgttgacatcatggtaaaagttctccgggtttgtgaagtcgacttgggatgagtctgttcatgtgaaattaggttagcaagctgcccatctcatcaactgtgcgatcaagcttaccattgtcaaagatggctttcatgtgactgatatgattagcactacccgagagtcggtagatgccctccatatccagaccgaacagctcaattgcttggaagcactggtacacaatgaacggaactgccgttccatcccgggcgtacaggtcgttcagcgaaacaccgaatactggcttcaacggaggaagatttgattggagactccggtccattggaggaggtccggccattggcaccggaatcatgggtgcaggttccggagcagacggtaccgacactgggtagggagctgtacccgctgggggcggggtgaaggtcttctccggctggggagcataaggtgtctgtggctgtggcaaccgatcaccgctctgcggtggctgaaccaccggcgaggtgacattattcgaggtgaatgccggcagtacggttgacccgcgcctattttgagtcgttggctgcgaagctgccgcagacgcagaagaaacagacccaccaccaccgagtgtctactcaatgggttagtatcgtgaagcaatcgagggacaatgcaggacttacagggtggcgctcgtatttgacaggttcggaagccacagcccccgggttgccttcatggcttaaaataaactcatggagatctttctggttatcgacttggcgaacaacatcggcaaggctcttaagtcctaatgccccgctcgcatcggtcttcaatgggctgacgcaaagaccttggcccagaagcagtttctcgctgaaagtagctgcaaataataagccgatgaactgaacaagaaagccacctacgtaggaaggaattgcacataccaaacttctgctgctgcagggtcaagcccgagtcacattcagcgatcaactgctgaagattgtgtacagcctgaggtcggtgcgtagacaccagctcctggcgcgccgtctgcgccgcctgaaccttagacccataatcgctatccgcgtgctggaccttgcgcaacagctcctcctcgtgctgcgccgcagacttgtggcccttgagaccgaactttccaccctgcttgtctcccgtgcgcacacggtcatactgctctgccaacgactcgtacttggcctttgccttctccgccagcgattccgcatcgacgactttcttctccgcagctaaccccgtctgtttccattgcttgcggccgcgctcgatgttgccggcaagctcgtgcaggtcgtcggacatctggtggagggagacggcgaattggaggccatggtcgaccattcgctcctggattcggtggatgtccttgtagctggaactgtacgttccttgtcggttgtcggtgcgttgcgccacatcgctgatcacgcgggacagttttcgcagcccctgagcgtgctcttcttcgagggagcctcgctttttcaggaaggttgagaaatcctagtagatattgtgttagcattcgcgatcgtcgcgggagtcctttcgcgactactaaccctggcggaggccacgctttgcttcagccgtgtcaggagtgtggttatcccgatctactcatgattaatataattgcgtctttgtttagtatgcacctgaaggtggattctttgtgtctgctcacatcagagtagataactttgtctaggcgggctttcagctcgtctgagatggcctcgtgggtcggctgggtctgctcgcccccgtggctaggggatgaacgaccggcgctcgacggaggcgcatcatgcgttaacgtcgaatcgtgtagggcttgatccgacatggaaagggtcttgactcgtgtgaatgtcaagagagagagttaaatagaggggggtgggacggaaagcctcacgggccactattaatggagtggcagatcaaaatgaggtccaggcacaggaacagggaatgctgcagccttctgcagtctcaattgggctgaaacgtggtgaacctggcggaatgtcttagtattctagtggtgttcttggggtcaagacgtaattgcgggttcggccaagtggatcttgggcttcattgtacgtatggagtgacctcagtgtacgtggtatggtgaactagtgagctctgcgtatttacaagcttaatacacaggaaaaatcacttttattctggtatcgtcgctagaatcaaatatcaacatatatacaaaacatccatgccagtaactcgcatctacaaaaccggaggtgcgacgaaagaatcgggaataccgtcaaagacccaattgagagaatcaaagacttccgagaacccagattcgctgaaaaatgctccgccttcgtcaaactgagctggcatcatcaaagattgatcctccagggagctatcatgttgccgcgtcatatgtcctgacggacctagtatatcttgattcgctgctatggcggcagctgcaaaaggagattttgttaacagccgggataaaacaaataaggggggaaaaagcaaagaaacttaccttgcatctcttcgaggcttctcaccggtcggaaccgttgtcgccaacgccaaaccgtgtcgtacacatgactcatgctcatccggcagcggactttaagctgtagggcatcttcttcggcaggttctagactcgtggcattccacatctgagcgagaatgtctgcaagacgaatgggacggtcgtgatccatgacacttattcggcgaattgctgagatcgcgccgttgaacagtagcttgccatggttgaaatcgaggtgtctactgaagctgctcttcaacaatttcatcagagcgaaagcagccgacacaatcatttgaagaatatagttggtggagtgaccgatcaattcgcctggcgatgtttcgagatctaacactcgactaaggaaggaggttgtcgcaaggaaaagcttgataagatcgtcacttcgcgcagtggatcctaaaaacatgaaatatcggaagtgtagttctgcagctcggagatggatcgtattgattgcttggaactagtgtcagcgtgccaaattggaaagatacgagattaactcaccagagatctttccttcaaactcgacatccatgtctctgagttcgcattccaaaacctgcacaaccacgagcttgtcggcgctaataaactccccaggttcgggtttactactgtataacgcctttgtcacccggtcgcagaacttctcgatacgcaaccgaatgaccaggtcttcaggaagtcggtagtcggcgtccctcaaagaggcaggctcaagggcccagtcgtatattgtactcggtggctggccgtaaccagtcgcaacactgccgaatcctaaatcagtctatgacaaacggccatataaaggaaacacccacttttgagccacgatgttacaaatgacccacgtatgtagtcgatcctttagggcttcaccttgaacttccatgcggaaagttgtgaactcttccgcttgaaccggacggtgtagcccaagctgcatggcaatttgcatcatcaagccactgagcatgaaggttgcatcggtgcgctggcttgtagtcggaagtggccatgtacacagaacgcaaagggccttgaccacccggtagtcttgcgggacactagtaatggttgcccaaagcagtctgctgaatggtccggacagtgcgctcaagagcccaggctcatattgagaccgtcgactcgcaacacagatcatagtccacgccaaaagagggcatcgattgagatacacctctgggggcttgggtggattcaaaagaggaagaaaggggtggtaataagtgaagtatctatacagatgtcaatcatagaaacgggccaagtaaatgggtagtgcatactgttcgaataatcgaagaactcgggctctagagagagaaacatcttccagtcgccattggccctcatcctgtgatacaatagaaccatcccttttcatagtcaaaggggttgctatagttgaatgagattcaattggcacggagacaggtcgagattggtcaatcgcggccgagtcacggcgagcaaagacatcctctgagcaatgggacatttcatcaccaggctcatgagactctacaccttgctcttgatctgaattgggtcccagacggcggcggagatcagcaatctccttttccatttcagcattgcgcctgtgaaatggagtcaataagatgagagagaagacgaaaaccagacaaaaaaagttaccttctcttagagatgcgcttgaacgactgttcaactttacagtctatcccaagccggcgacagcgcgaacaggccgccgctggcgtttgaacaatatcacaccgcagctttcaaggtttagagacatcagcgcgattgtcggagaccggatgcggttggggttgattttgggtaaaatcgcatagtaattatatgcacatgactcaccttttgctgcttacattcattacaggcttttcggctgccacctcggcgtttgcccgtgacaggcggagccttctccatctcgcaagattccgagcttgtctgcatgaaatcgataaccgggggtggccggggtagagtgggggaccgaaagtcggtcggggggattgaatagtgcggcccatccggtgccagtatgttccgataccccaaatccatggagatcagcctgcgttcagccggtataaaaccccacgaaacgtgaacgagtgctcgcggagtccatctgccgtaaatcggagaaatcggcccgctgaaggaggatgtggggagcctgtctgccgattgaggacgatgatttgcgggaaagttgacgccgagacgaatgtcggcggttgctgagtcagcgggtgcctgaggcatggatgatgtaatctttccatgatcccaagttttaagttacctagtcaggtagccctagagcaggttgagctgagcacgttgttaggcataggcatagggttatgtattggatagatacaccatcttctgcatagggattatacttcaaagactagccaattgctactaagcattggagagttcatagcatccatggatattgccttaccgccagaagtatataaacaaaacactgaaataaacaaaatttaacttatattcaagtggagatcactggatcgaagaagtagtatctagagttcttaagtcatagccgatattccaatagtcaagccttatatatgtggacttcatgccccgcttgccatggaccgaggtcgatgtggattatttgattatatgatctgcattcaatacatttacatatttaactccttaatcctttgtttctgcaagagttatcattccaatatctgatccaagatacgagtgtataagagtgcgttgtcctacagtcctcctgctactattaaccaagactaacaactcaacccaggcatcaatcatgtctgagatcaacgccaccgcaattctcgttccaaagcctgagaaatttgaagaagttagcacagccccatactctttgacagtctaataatctaacatgtcgtcatcctctaggtatctactcttgtagccgaagtcatcaaacaggtggaagaacatgaaccggacacactgctttactacgcattcccaatcaaggacaagaatgagattgtgatcgttgagaggtaagtcaaccagcctgtataccgtggataggtcgtctcttggtagctcccccgcatggagaaagcagatgtgcctcggtccaagtaccttgccgtccaagattctgatcctccaatatacaggtataaaaatcaagtggcgatccagacccacgtcaaatcaccctatttccgaaccttcgcagggaaattatccactttattgacgaagccggcggagatcagggcaggtggattcctgagtggttcgaggggcgtatcgcgactgtagttggttgtatctgatgtctgggggtggttgggtcgatataaataggatgcatcaactcccagaatgattcgacattgagtcggccatgtcccgtcactcgtgatcgacttgtcatgcgattggtgcattagtggtggcggcccagcagatatcgggaggtctgtgagatatttaggagcaattcggccctatcagacgaagaaccgacgacgggggcatagagcagggtattcacgaccatatatcctccgtactttgtatattctcgattctgatattctatttagacaccctcagtgtcaatatttagaaaattaagtggagacggactctttttcttcagaaaaagaatcttgaccttggctaggggaactagtccaatcacttttcccttttttcccctttctgcctcttcttcctcttctttctctctatatatgttttgtattgttcttttggtgagttccaaatcttccttctgtctccacacctctcccaccccctcttttcccaagctccagcctcctagcttcttcccttcgagctgttccccccctgaagctcaagctgatattctgaagatacccttgccgtgttgacattgtgtccttctaccttatcgctgccatccccttatcgcccagcccctgttgcaatctgccttgatctggcctgattcatacttttttttttgcgacatggcgtcgggtccggctactcagtcattgaaggtgagcatcggatcggatcagcgatgcgcggcgtgaattgacagtctatctagtgtgtggtgaccggtgatggtgcagttggcaaagttagtataatcccccgacactatccctacttataacattgcaatagatgctgacatccattcctccagacatgtcttttgatctcctacacaacgaatgcattccccggtgaatacatccctactgtgttcgtaccctctgcccctcaatgcgaaaccttgaatcccgaacggatattgattccataatagctttgacaactacacggccagtgttatggttgacggccggccgatcagcctgggactgtgggatactgctggacaagaggattacgatcgcctgagaccgttatcttacccgcaaaccgacgtctttttgatctgcttctccatcgtcagcccgccatcattcgataacgtcaaagcgaaggtacgaacggggacatcccatactctttctagtttcgtgcgactaaccgttcccccgcttctagtggttccctgagatcgaacaccatgcccccaatgtccccatcatcctcgttggtaccaagctcgatctgagagacgaccgcgccactattgaagccctccgcgcacgcaagatggagaccgtctcctacgaacaagccctagccgtcgccaaggagattcgcgcacataagtaccttgaatgttcggcgctgacacaacgcaacctgaagagcgtgttcgacgaagccatccggtgagtcttcatatcctttcccggaccgcttgtggatattcgttttctaactgtctaccacagggccgttctcaatccccgtcccactacgaaatccgggaggaaggcagtcaaatgcaatctcttgtaaagcacgtttgtttggcttgactcgtctccccatgttctcgtatgctacaatgagtaatatagtgttaatacggcgtctgggtagttagaggcctttttttttaattccgccggccgcctctcagtgctgttttgtgatgaaatccattgaccgtctttcttggcgatatttttgtcgttgcctctctcggcttgttcatagtctgtcccaattctatcgcgatgttcttgattccgagattataccatggtcgttctaagttattatttcatgtcataaatgtccactcgggcaatgtttgggaagaaagcacagaaaagaacatatgaattggtatcttcaaaatcaaaacaatagagacatgaagtaagtaatttttggaatacataagaaaaaaaccagccaaaccagatgctcccgggaatgcatggctatcaaaatgtccagctgcctgcagatgctccggacaccttgctgtacactgttccaatccctcaacgagttgagaccgttccaaataagccacgacagtgaaccagcgatttttttgatctacatccggcctctgcggctagggtgcagaccagcccactgatcgttgacagcgctgccagcgttgtcggctgcgccatccaggttagcagcattcgcaccagagccgccagccggggcagccttcttctcgtgcttcctcttgtccttctggatatccttagcctggcgctggcgctcctcattgagcttctcgttcttggcctggatcttggcattgcgatgttcggacttggcgccgccgccaccagcactagaattgagggttagtatgcggctatgactgcagttgcttggagagcaattatattctcgaattgggggtaactcacgtcaactcgacgttcatgcgtcggggtgggtactttccgtcgtcgaagttggagtggtggtacaacttgagacaggtcttcatgcggtcgtagttgtcaaactcgatgaatgcgaaaccgcggcacttcttggggtcttctttcttggttgcgacgcggattgtggccggggggttcttttcaaagtgcttgctcaaggactcatggttggcggagtagggaaggttgcctgtatataggaatatcctttggttaattctgcgtctttggttcgggtagttcatctggattggaatcacttaccgacaaagcagatgaagcgggaactcttctgggcttgctcgccctccgcagattcagcggtaggctcttcttcggtctcagcagcgggctcggtcttctccttcttctgctttttctccttcttgtccttcttcttgtctttcttctccttcttatcgctgtccgccttctcggcggggatcacgtcaatatccatagcgtcctcggagggagcagcaggctcggcgtcggtctcctcggccttgcgcttctccttcttctcagacttttccttcttatcggacttctccttcttgtcagacttgtccttcttctcggacttatctttcttctcagatttgtccttcttgtccttcttttccttcttctccttcacctcttcctgtgccggagcagcagtttcagcgggagcgacaacctcggactcctcttgcgacttgcgcttttccttcttttccttcttgtcttttttgtccttcttctccttcttcatcttcttgccctcgggctcgacgacctcatcctgcacgagtttgcgcttatcgcccattgtgtttgtttggagtatatattgtgatgaaaagagtcaatgataggatgcgaaagcaatcgggacgaatgaaagttcgggtaatttgggaaaacaagaaaaagaggtggagaactttgcagcgcaacgagactcaagctccaaaaaaaaagtcgggcggagagaaaagtgaaatttatttttgccgtgtctcggaaggcggtcaaggcgcttgctgataagcccttgattttatagttcgcaatttatctacttactacaagcaattgtttgaatacgatcattcaagtgtgcatttactcgaatcatatactagtataaagttcgtgaccagcgctctgttagatcagaacaccaagatcttcacacccttcttcaccccatagcgctcacgcagttccggccgagtaagcagcttcaacagcggcatatgcgtgtccttcatgtcaaagatgcctctttgcttctggtcaatgtgcgatccatcaatgacaatgcgctccagttcctccaggttgagagttcctagaagatattatcagcatctgtatatgtaacgaagtgagctatctacagatagcaagcaagaaaactcaccagactcgatcaaatctgagattctggttggggttccagccccgataccagaccgagcacgttgaaggaactgcttcgcttcctccaacttgatgtgtttcgcgaacagctttcctacaatgctatccttggtttggaaagagcgcagtgccctattaaccccaattgtcagttccggcttcgattcattccagaaaaaaagactaaaagttgtccacttaccgtacaacatcagcggctcgcatagcagcacccgaaataactagtgtatgaggggtgccgttcttctcggacgactttgacaggtcggcacctttactgaacgatttgaggaattcggggagttgctcgagctttcggctggaggtgaaggaagaggtatcgaggaatgcggaatctatagattggttaatgtctagaacactcctcgaccttggccgacagaacaagaggaagtatacatacctggaatcgaaagatcactcagttcaacagcagaaagctctttttcgtgtcttttggctttctgcgcaaagtgatcgcccaacaaccggccgtccatcttgccaatcgactcgtcaatgccgtctttgcgtgttgactgatgctcatcgtgttccgcctgcttctttttgttcttgttcttcttctgcttcttcttgcttgacccctctgcgggtgtgcctgcttcgggcttttcttgcttgagagcagcgtcgtcggcttgtctcttgcgcttgttttggagcttattggaaagtcctttgggggcgtttgtgtcagccattgtaagaatagcctgtatgaactcggcaacaaaatcttccgagtattttgagcttcaattagtaaatgcaagtctcgaagacttcattgcgcaaaaaaaaaaaccggctgattcagccaatcttatcgataagaaagggccaatcatgcactggcccgcaattgttgtttctagacgcgacagacaaacatcgacatcctgtaattcaccgtttgcccagctgatctgggattttattgtggtggggatcccttatgtggtctattatattgtgcgtgatatagttgcacctatcttgcagaaaaaaacaagccatgtcaacttctacacccaacgcgcgtggccgtcggtcaccatttgggaccgctaccccatctggggaaacaacattgaccggagtcagtgctacccatcaccatttaagagactataaattgataaccctattatctccctacagcttcaacgccttcctatccatacccgataccctcttacgccaagtcgacttgtcaccgcaaccaccccaggcacccaacggtccgcctctcgatatacaccacgtcctcgaggcgtgggtgctccagcaacgccacatgtaatccgtgcccggcaacaacgagcggcgaatacccctggtcgggatcgccgacgaagcggcagagtgcagcgggagactacattcgatattcttagaaacctgggcaaaggtaagagcttcgccacgtatcattcgacatgagaactgaactaaaatacttgggttgtcctagcgctcgctcctgtatctcaacctatccgatcctcgccgcaggagaagccagagcctatagaggagccaattgatgaatttgaacagcttgataatgagccggaaatcgagcgaccacggttatcattgcctattcaagagtctgaggaagaaggcgatgaagtcagtcctgaaatgaaccccccgaggatgtctctcgccttcgcagaggaggatatggatatgacttaccggtctgtcgaataccctcgcgacgctagcgtcagagaccgggaccgtttatctatgatgagccgagctaccggaagaatcagtggagatttcgacgagacgagattagagagcgatgatgcagacgaaactggtattgtgggcgaggatgatgaggcagaggatacaatgatgagtgggggcgactttgatcgagggtaagaatacaagagttggattttctatgttacaagtaatggctaatatgacaaataggggagagacggaagacctaggtcgcttccactttgatcttaactttccatctcctgcagctgccccgcttgaatatcccgctgacgaagatatgaacgatatggagggtttcgaactgtccaccgcggagcaaccccaagctccatcagacgatgatgatgacgatgttggaggtgattttgggtttggactcgagttcccacccgcagcatcccccagtgagagccccggcatcgttggaggtggattgcgagatgaagctatcccagcccagagaaagcaaaagaagatttcacgacatggaattcctgtcccaaacttgcccgcaggtgtggtaaaaaagctagcgactcgcttcgcgcgttcgggggctggatcaagggcaaaaatcaacaaggccacactggccgccatcgagcaagcgtcctcttggtactttgagcaagcaagccaagatttggctgcgtattcaaagcatgcgggacggaagaccattgatgagagcgatgtcaccacattgctgaggaggtcagtttcaatggaagccaaccagcgcatgggagtaattgctgacttgttccaggcaacgccatattaacaaaacgaccacagtgttttcccttgcccagaagcatttacccaaagaacttcagcaagacatgagattgtccatgcctccatgaataacaaatttcccatgaaaagtaacgctttcaacgccaatgaattatgctaaggtaaagctggaatcccactagattaccagtttcggttctggcgaactcggcgcagtgcctcgttggggttcttccgtacaaccatccacatcatgatggtcgtggccaaagacaggccatacctgcaaagtatgagcgacaatctcgaatgggagggaaaagcacaacggatctaacttaccaggtgaagatgtattgagaatggttgtttctcaaattcacctccgcggcgcggccaatcgggatacccttagcctcgcgatcacaagactcgaggaagtcaggaactagaaacgcaaatcaatgttagccatgaatgagcaagattattcaatataggctcattacccattgtctgctcaatccaaacaggctggctcccgctcttctctgccatctgattgatatccgggaagtagaacttgccctcgtccggcttgttatccggcgtgaacatgtttttcttccatggctctcgtagtaaaccttccacggtcacctctccatccggtacacccaaaggtcggtccttttggtccttcaatttccttgagatccaaccccggttcacaagtacggtgctctgtccctctcgctcgaggggagtcactacgatgaacccgtcctctccttcgttcatgcgggggccaaccagcatttctttgtcatgacggaaatggccggtagcgtacacgcggcggtagtcgaactctgaaatggcatccgggtcgactcgcggcggcagtggcagaggaggtttcacgagacggtcctcgaatttggccattagtttggttttccagcccaaacgctgtacctgccatgttcccaggataaatgagattatagggatcagagctatagtgtagaacaatacgttagtaattatctctaaatatagcatttccgaggatatgtagcattgaacattaacatacccaagatgatcaggccaggtccatgtttcttattaacacgcacaagccgcgccgggtggtctacaatattcagaccatcggccagctggcgtgattgagagatatggcggaattggtgtaggcggtatttggcgcagagggaattgatcttggatggtacacgagggtttcgaagagcgcgagtcggaggcgtccaggccctcgcggatgtcttctgcaaagcagagaagattggccgcatgttgacagtttagaaacgcgaagaatgcactcttaattgacgttcggatggggttggagttgtcgtttctgcaaatgcgacggcagttgggaatttcgggatcggtgaccgcccaggcttctcctatcgacaacattgtatacttgtcactccgcactggcgcttagtcttcacggaatgcgattatgacgattttctacatcggaggtcttcaggagggcattagtgctgcagtaagagatgacaaagtggttacttgttttgttagaggtcgctgaatgttctccccgcatcgaatgacatgttgctgatcttgggacttgaacatatagatgacgaagagttgagctctgaatgggaggaggactattttggtgatgctgaggtatatatactcactaaaattgaatgtcgaacggtatctgattctctacaggtcgtacaagcactccatgccaactcgattgtattgcgcttgacagcgggttcacaggaagctgaactcctggcctctttctctccgatccagaaggtcccgagtgttatcgttatcaagtgcgttcaaccgtccaaggccttatggcaagtcgatattagtttgctgaccgcgttctagcaatggcaagaatcattatatcgagccagatatcacgaaggatgacttccgcactcgattgattgcagctttgaaaaaggaacagacaattcgtcctacacagcaagtacaaggtaatgatacacctacagcttcaacaaataatacgacggtgtcagtcgtgccacaaccccagcgtgaggcgccatccaatgccagcaattccacacaatccgcaaagaaagcaagtgaaattacaataaagaaacaatcaccgattggacaagtaccaaagaaagctgcggaacctgcaaagtcaacaagctctacatctcaaacatcatccaaagaagccagcaataaagactacaaaggcaaagcgccgatggggtctaagaatcccactgccaaaggtgtcgtaaagagtgaacaccaagagccaaagactatagtttctcggggacctccaaccgagtaccggctacaagtgcgcctgttcgatggaagctccgtgcggtctagcttcgcacccacccagagcatccgaaatgatgtacgagcttggcttgatgaaaagatggaaggcgacaaccgaccctacaacctcaaacacatcttaacccctttccctagcgaaactctttccgtcgcccaagaatcgcaaaccctccgcgacttaaatctcggttccactgcgaacctcgtcatgattcctgtatcaacatacacggaagcctattcggcagcgggtagcttgcccgcccgtagtgtctctgccatctacaacttggcctcttctgctgccagcactgcaacgggttttgtgggttcattccttggatatggcccaacggcaccagcaagcggtgcaaccacctcttcggcctctccggctactggcaactctcagcgtcctgggactacgggacccaatattcggacgctgagagaccagcaagatggacgtggggataaccagctctacaatgggaaccaggtatgtgattatgcgagatgagaatatcttgtccgggattggctaatgtctttctcagttgaatttcgagccacggaataacgaggatgacaaggataaatgagtcccagcggtattgcttcggtgttcttgcattatttatctatggcgttgatggatctgattagctcaccagcctctctatttaactatgacactgctattattcacattttggttactgcaaagttggcagtcacaataagtgatcttttccatgaagcctttactggtcctttccatcgtatttggtttttgatagaggtccaaacaatcatcagagaactacaaatattggagttcgttaaattcatgcattcgaattcttgattcagtagtcaggtatattgatccctttatcgaggagaggtggtataaagtacaaagaggggatatggaaatggctatgcaaaagaaagattggctcggttatggaacaagcccataaatctgtgaaccccatcacttattacgaagaatggtatctgtctttctgatcaaaaagggtcaaattggtatcaaccccttagtaaggcttagcggcagcctggcaagctttctgtggtacgattagtatgtattaaaaatgcaagaaaaaaaccgaagtgtaaacataccagctggtcaaggtaccaaccgcagatgctcaagttaccctggttctcatccatgcaagtgcggaagttgcggacgtcaacctcacaagcagggttctcgtacgaggtctgggcagcgttgctctggtagaggccgctgtccataccctggaactcagaaggagcaggagcctgctgggcctcagcgggggcgctggagccgcccccgaagaagccaccgatggcgtggccgatagaggagccgacggcaacaccactgcatcggaataaaccgttagcacatatttcgggagagtcgaatcccaacccgggtcttgtcggggaatggatcgcaaagccgaatctggaacttacgctgcggtcgaggccatctggccgaaaagtccagggccggcgctctgctgctgcatgggaggagcctgggcctggggaggttgagcggcggtcgagtgaggctgcgactgctgctgcgaaggagccgcgggccgagcaggagcggcggtaggacgacggggagcgctgcgcgcaggggcgggagcggaacgacgttgacgagccattttgttgtgtgtgggtttttttggaggaattagaaagggaggtgaagatatatgcaagttgggataagtatacggactagtggagaaagaagaagctagaagatgagtaagttcggccattgaggcaaactccgatgcaaaccgtggagttttctggacgttgattggctgacttcagtcacgtggatcggacatcacggtgccgattgcccggagcggagtcagcaacggggatactacgggaattactagcatgtgctattaaaagagcaaattatgtcataggaaggaccagtcggtttcatctgcttgtttgtgcatagagtatatcgcggagcttgttgcagctcccattccgaaagggtatcttgattcatggagacatacaagtctcgtacatagtacacagagccactcattgtggtctcaaaatggccgagacatccatctgaaggaagctcatggccgggcatgcttggcaaatcgattgctagattcgacaatgcataacgtgtcgacagaattccggtagtggtgaggcatagccaataatatgctttgggaatgcccggcagtccgttcttagggttcgaggcgcaagccggtccgtactgaattctcactaagatcggggtgcaatgcactgcactcattgcgcttttcgggccttccgagcctcctccttcttcagccgtcgctccttcttcttttctttcattgctgccgtgttgattttcctctccttctttgccttgctgtcttccaatttgtgttctcctttggatttcttttggctatccttctcggtcttttcggtgtggtttgtgtcaacccggggctctgctgctgttgcaaggtcgacgcccccttcagaatcgtcatcgtcagaatcgggttgcccgttcgtcgcgtcaatgctcttgagggcaaacatggctgctttgagctgggcacgggctcgctctttagcctgcttttctgcccgttctaagtcatacttatcattgccagcctgtaaaaatttgattaatcgccattctatacaatataataggttagtacttacaaggccgtgtttgatgaatctgctcgcagctcccttatcaagggtcatggggcgttcctcaggctcggtctccagtgccttgatcttttcaaagtactgcttcacacgagtcagttcccggaacactgggtgttgcttcgcatccacgccatgaagccgcagataagctgtcaaatttcattagtaagagtaaatttgtaaaatttgtagtgtgacgtacagaagattaacgattctagtgtgtaggtgatcaacacgtgaagttttgctttgtccataacaggcaatttgtttgagtttttgagaagtgtgctggtcaaaagaggctggagaacagcctccaagtcatcgacattatcacccagctgctcaagcagcggtagtaggtccgttggatccatgacagtgagatgtgatgtagatgagaaattgcttgatctaaaaaaataggacggattcaactgggcggtgaggggagcggtgtggattctggaccgatcatcatctgcgcaactaagatcgctgagaactcgtgcatatccaacaattggttgattgttacgagataggccttggtggacataccagtggctgggctcttgcctatttgacaatatccatgacataaggatcgatacctcaccaaacccatcgctctaacctcctccccgtcgacaaacacatacttgcaactcaatcggatatcccggggagtttttcctcaacattctcataatgcagtcgacatttcggcctcgaactttgtggcgaaccggcattcttggtacatgtgttcggtcccggttccaggtctatggtgtgccaaacacacgatttatctcaacatggaaggaagagttgcatgaggtcaaccaggatacgaaagcccctctatcaggacgagttcacatcctcggaatgggtaatctaggttgcttctttgctcattctttagccacgagacggtcaccgccgcccatcacaatatgcttgcacaatgactatctctaccaggcctttgtccggaaaaggggacaaatttctgtcagcacacatggccttgacgatgtcagaacgggatttgatgttgaaacggtggacgaagaaggcagatggtatacaatgccgcctgttgacaaccggccctcgccattcaatccccagtctccgccggatagtggtcctatcgagtgtctaattatttgcaccaaggcgcatcacacggagcttgccattaaagatatcagccaccgcttgactaaagattcgaccatttgtcttgttcataatggcatgggtgtgctcgattctatcaatcaaaatgttttccccgatcccaacaatcgaccacattacatccaggcagtcttcagccatggtctgggtaggaacgactcgttcaagatttcgcatttgggagttgggaccacaatccttagcccagttggagatccaagcatccctcccacaaacccggaagctgaccagacgtgggcgccgtccacaaaatatcttctgcgcctcttgactctcactccgccattggtcgctgtggctgatacaccggcaggtctgttacaatatcaacttgaaaaattggcagtgaactgcgtcatcaatcccctgactgcactgagtgactgtaccaatggcgagatcttgtactcgttcagctttacccgtgtcatgcggctgctactctttgagatctccgccgtgatttgtgctcttcctgaattacaaggtatcccgggcatcgaagatcgcttctccccagaacgcctgcgtcgtttggtcgtgaacatcgcgagcaacacggccaagaatcacagttcaatgcagcaagatatcaaccaaaggagattgacagaaattgaatacttcaacggatggattgtacgtcgcggtgaagaactgggtatcaaatgcgcactcaactacatgatcaagcatttagtcgctgccaaagcagctacccatcggagccgagaagctggcgcgattcccctcgatctcgacaatgtcatctctaccaacgaacctcccatttaactgctccggactgccttcttctgtcaagtccttactctaccttggctccttgtcatatcgctgtgtgtgagcaggtcaaaggatttaacaacaatctaaattatttgcgggaactctatacagagacagttttggccgcatgatcgcagagctctttgatctgcttcaaccgtctcagcagcatctccgcttttgaacgatgtgcttgcactgtggtgtcgagttccatggtcttctgcagcgcagttatagttgcatctgcctctgccgcatatgtctgaatccacctcttgattgtggcctcggatcggctctcgtccaaaccctccgattggccttcaagaacatggttccgccaatccttctccttcatataactcagacatgcagcgacctctgtgcggtaacagggtccgtgtggagtgacttggtagttactagcgctgtgtcagtggaggactgtatatattgcgtagagaatgcgcattgtcatgtaaaatatcaatcaaaccacatacccatgatactgattcagccacaactcctcttgctgctcagcagtttgaatgtcccggaaaacaatatcatcaagatagatcgaatctgcttcattcacatcgaggaagaagccatctatagaaaggggagggatgaagtcagcacgccgaaggaaaaagaataacaacactttctcacattctgctagtaaagtatcattcggatgactaccatagttcatgaacacttcctcgccctcctcataatctttcgtagcgcgaaattcatatacactctcatcgaatctgacatcccgctgtttccatctagtgttagctttatcagtagtatggaattcagacgaagtacgtacagcaacatccgcatgattgaagtaatcagcaaatggcaccagccccatcgcatcattagggtcttccggcgtttcctggccctctccaatccaatagaagctcctcgtattcacgatcagccagttgtaggagaatgtctcccagttggtctccgggaaaacagaaatgacgtccgtccatgctttgcgcaggcgctgggcctgctgcgaaagaatgttctggtgatctgagctgtatttcctcgttttggggcctggctgtagagtattccagagacctgaaatggacggcgggagaagacttggctgcttcgagtctgtcgaggcgtcgtccttgctgttgggtaactgcggtcctcccaggacggttggccagaggatcggcatgctgtcttcgaagtcttttcggctgggccatgaattgcgccattggtcgtattttgatagttcatctggtgcagcgtgtgtgagatacgctgctagaagtgcttgtacggcaatgtcttctgggagtttgtcgataaaggcggaagggatatcttcggccctgagcatcaactgtgtcggcacttggaggacaatttctcctttctaaacatatacttagtgagcaaatttcaaatgagaagtagatatagattcgaaggctcatagtcatactttaatgttccgagtggccatcattcccaacccacgtccttgaaaccgggctggggtcaccgagttgatatctatgccattggagattgcccattcagtgaaggcctcatgctcttctccgggccaccattctggcttcatattggcttcttggcagattttgagatgcttcctccagtcagcatatactacaagacagggattgagttggagagatatacaattgttagaacacaccttcagagtagtctgttctattatctcctgttccttcaaaccaatagcctagaaagaatatttagtagtctcaatgggcgtcgatgtgtgtctgaaattcactctacactgtggagcagaaggttatcgataaaggcgttatcgcgaactacggcagggcacgacgaccactcgtgccgtccctgccgatctgataatcgtaccacttcggctttcacttcagctttcgtcccagacgatgcacaagttcctttagctttgggattcataatgtcagtacttgggaggcgtggagcaattgagcttcgagccttggctaccagcccaaatctatcagctgcaagcactttacggcccttttccgtgctgaaccgcccaccaccaaactaccccggccatgtcccattgaccactattgaacgcggtgctcttgctataggctcggcaattggatcccttatcaaccctagaagagcgggtgcgtggatataatttcctacataactggaatagaatcttggatcacgatctaatttggtactctatagatctcattgcggccttgggcgaagccaccgccacaccattcttcatatatcgactacgcgatgctatgctctcagatccaacagggcgccgcattctccgcgatcgtccccgcatcacctccgagaccctcaaaatgacctatctccgcaccctccccgagaactccgtcggccggacatacgctaaatggctagatcgcgagggcgtatcccccgacacccgagataacgtccagtatatcgacaatgaagaatgtgcatacgtcatgcagcgataccgcgagtgccatgacttctaccacgcagtgacgggtctacctatttttgtggagggcgagctcgctctcaaggcgctggagttcttgaatacacttttgccgatgacggggctgagtctatttgcctttgtacggatgaagcccgccgagaaagagcggttcctctcgttacatctcccgtgggctattcgcagtgggctggggagtaaggagcttatcaatgtttattgggaggaggtgttggagaaggatgtggacgagcttagagcggagctgaatattgagcgtccgccggatctaagagagattcggaagatgattcggcagcagcagaagcgggaaaaagagagacagcagcaggcttcgaactgagctgggttgcgtcctgtcggggcgatgaaatctcgaatatagggagagatgtatgattattgaatcgttgtagaccatatcaccgatgcgcagatgcgcaaatgcgaggctgattgccttgaattcaacccagctgcaaatgtagaagaaaggaccataacgcctggagtagattttcccagtggccacgagcggatagcaagagaggtatccgaatgcaataaacaaaagggccataggcacaagtgatcatcgatcacattttatgcgacccttacaggtccaagagatcatcatcgtcatcccatccacctttgcggcgagaaatgacaattttgtgctcctcctcttcttttcgctggttctctgcaacagcccctagcagctccttaagttgtgcctctgttaccttggaccgtaactgtccagactgggcgagcatgatgaggcggttctcgatatcggttgcgcgcgactccttaacgagacggatacggcctaggcgatcggcagcgtcggggtcgaggatttgtgtcaggatcgaagcgcgttgctcggctggaatgaatcaagatgggttagatgcggaaatataaggacgtcatcgaatggtctaaagggacataccctcggcttgtctagttgggttcattagcatacagcatcttcttgcgacttattccaacacttacctcctctgctgtgcctgctcaccaccatcctgaccggctggaccacctccacgtcctccttgttgctggagttgcgcgagacgagctcggcggatctgtttctctcttagtaccggagccggaggatgcagacctctcacatgctatggtgcaagactgacctcttctagctctgcgtctgccatggtggatattcaaatcaagtgaggggcttggagtgatcaagtgatgaggaatcaaggattaattcggtgtaccccacttgggctcgcctgagtacggaggggtgggacgaccatacttcaatgttctctggggtggttttgagatagttatacaacaatttgctaatatatttactggcagaaataggaattgaatactgaatgtcatggtggtcataattctacgacttgtatatgttcaactaccgtctatatatttagtatagttgtcttcaacttcaccctctatagtagataattataaatttaaacgccacaaaagataataatattaaatagagatacgtagaaataagcagtgaataacaacagaatcattcaacactatctacatcgtcgagtacatatattcaatgtcccctgggttcggagtaagtctcctattgtaccccgtacctggggaattaattacacgtgggactggaatgttttaaattcctccgtacaactacgcctatttgtacataaccattagtctatttctctaattggctggcttaatggcctaatatcttactatattcgcgtggtcaacgctatccggcatgttgtgcgtgataagaccttgaagagtacttttgtagacgcgtatcacacagccagccactaacaacacggtaaattgggatccattctactgcgccttgaggggcaaatctcaggaaaaaaaaagcaaaaggcttcagggttagctccaaataaatcccccgggggctatcagacgcgcccggggtgtccgtcgttccgtctcccggtggcaatgctggatttaccctcacggtggccttcccctcacgcccattttatatttcatattcatatacaagtcttcactccctgtacaagtgcatacgacgtaagcagtcgatctttcaatctttcaataagcccacccgtgctcggtccacgggttcatatccgggtgactaagcttcgattcgccctcgcgctgcaaccctgacttcctcgacatcctcaacaggctgatatttccgatcagacctgtttgtggcgattcaatccttttcttcactttcaaacacattcctttctgttgtgtcttcagccgtccgactctcctcactccgaattccggattccgctatcttttaccctatcacgtacccccgtggacctactcgcacgcgcgaactttcgattctaaaacctgtctttttggtgtggatggcgtggatagcatcttgtctaccaaagcttttctggacgtgatctcgattattgatcttgatctggcgacgagcgatccatttcttcccttacatcccgaacgccttctacgtcactcaccatggccgagtaagtatccatcaagatttccgcgacttcaattattgacgctttaggtggggcagtttaattgcctttcagacctcgcatcatagcttcttctccccatccaaaatgatctcgcgcaactcccataagaggtcgctctcctccgagcaccggtccttatctcctgaccgaaccgtcacgaaagccaagtccaccaccaatctctccgagatcgccgctgccaatgcagcacaaaactccggatattacgaaagcagttttagcacattgcaagacccgcgattgctgatcgggtcggaggtctcgcattcgacgtcatcgtctcaccacccggatctgagcaacgaagtagcggcattgtctgtgaaattgatccaggctatcaacaaccaaacaaaccttgacgataatctggtcgctactcggcaagagctagagctggctcagggcaaaattcaagctctggagtaccagaacgagaaatatcggcgagatattgataaccaaatctatataaagaaggtcgactctgatcgcgaaatttcgcaattacgagatgcattagctgaagaaacgaccctgcgtctcgccgctgaaaagggcaggaaaaatattgagcaagaagtggaaactctcactgcggctctttttgaagaagccaataaggtcggtaatctcctttaacgtatgcattttgtactaaattttaacgttactttagatggtagcttcggctaaaattgaccgagaggcggtggaaaagaagaatgagcagttgcgttcacaagtcaaagataccgagttgctcctggcatcgcaccaagaccagcttgccgagctcaagtctgtcatgcaaacgatgaatcttcacaaagatgacatggaaggacgtcccgctaacagtccatcgtctccggacgagtcacaagcgcaaggttctaaccaagacactgagtttgaacccgttcctatattgattggcaacccggaggagtttaccccgggtccttcctctagcttccctcatctcctccgcatggtatgtcgcgcggatttgcaggcttatgaggatttccgcgatttgctggtactctctcggagctcaaaacctcccagtcgtgctgccagtgggtcatatggaggcctcaacgtgatgggcctggcaagctttgcgagtggagggtctccatcgtcgacctcatcacctaccaaagggtttagctactcccctaatgggagcatatcttccacaacgggttcgggattttccttgaaggaaactcgcttctacaagcgggtgcttatggaggatatcgaacctacattgcgactagatctagcgccggggatttcttggttgacgcggcgtaccgttctaagtggtatctgcgaaggcagtctcgtcgtcgagccaatgcccacatcagctcagaaattcgagttcccctgctctgtctgtggtgaacgcagacccggcacgtctaatgcgagaacccatcgtttccgaacgtcagacagcgagactgctcaaaggtactcactttgcattctctgcttagaaagagtgcgctcatgttgcgagttcactggctacttgcgtctcatccttgatggacatcttcgggctggggataccgaagaagaaaaggaaatctgggatgagactatccgtctcagagagaggatgttctggtcccgcgtcggaggaggcatcattccattgggcaatcgcccaagcgaaccggaggtgccggccagcacagagcctaatactggcgtccaagacgatgccgaccagtatctctatcctgtggacgttacttatctcgagcccaggacagaaaaagtacccgttgctgatccaatcgcgccggaaacaccagttagagcatccactactgatcatataaccccccctgatctttctcgacctcaaagccctatgtatgacagggatgatgctgcttctttggatgacttgcaacgcaagcgactttctattgattcagcagcaagcgtttatgaagaagccagcactgacgtggatgccaataccacggcacctgcccccaacgaaccctcgattattcagagtcgagagacagacacagacatcgccaaacccaatggtttgagcgactctttacctcggttgatcacaagcgatcaacacgagtgagacgactacacgttttacacagcgtttaatgatccgcttaatgtcttcacccttcactacaccccttgacattgcgttcttcagtcacttaattttcttctatttcctccaggtcgttgataagacctgccttttggaaatgctgcttctgcttctgcttctgcttctacttctacttctacttctgcttctgcttctacttttacctctacctttaatgaccctttgggttacaccttgataatgttcctcatccgttctggctttttgggcatccttctcttcattttcggcagcatggcctactgtattattatcaacttttcgcttccaaccatgtatacataattatgcgttttgctttccccctttccctttttttttgcggacatttggaccaggtgcggcattgtggattttcactgtttctgttcttttttctcttttttctcctttttttctgtgcccacttttgattcgcggcaatgctggtttcgggacccattggtggaagttcggtgataaatgatagacgatttgaatcaaattgcatacaaagtcatatattctcttggaataatacacgtagaagatgcgagtaacgcatgccaattccagtcactaatgcctagaatcatcactacttcatacggaaatagacggatccaagtactaaataggagaacagcatggactagacaaagatgtttcatgaggttaagaataaaaaagcgctattgtacacaaataggaaaaaagaagctcatcatccagattccatccctcccaaactccacaaatggcagaaaagatagccttcgaaatagaaaacccgcgaaaacctcaatgcgaacgagaacatcccgtctgaactgtacgtagccggggaggatatcatttcttggcaagctggtgaatgtgtctgatctggtcttcgatattcatgctctgggggttgggagtggcgttcgggttctgtgggccagccgaggcatcgagacccgtagacagacgcttgcggcgagcttcctcctcggggtcgaggggagcagggtcgaagacgtcgctgcgctggctggcaagacgcttgaggttgttgaccacgtcgacggtggacagattggtggtggcactgcgggcttcggccttggcacgctgttctttccagcgcgggtcgagcagctcgatacggatgtgctcgtccagctcgttggagggcactttttggttgcagtaagggcagatccccatctgggcttgttgacggcgggcctgagcgcggggcacgtagtctgagcggatgcgcattggctgttggcctgcgggggcttgggctgctgcctgggcggcggcggcttggtcgcgcgcctgagtccgctcgcggatgcgctggtcttcggcagggttggtgaactgaccggctgcggggtaggggcctgcagggtagggcgcgactgcgggctggggggcgggctgagggacgggcattggtgctggtcgaactgggtaggcgttgtagtagacgggttcgtcaaggccattgggcatcgcttcatcgatacggagtgcgttgagggaaaaggacgctctctgctcgagggaggcggactgcaggtcattggcggaggtcggcggtggcaagtctgcgtggttgtcgtgctcggtgaattcaatagtctcgaccacgacgaagtcatgccagtcgatctgggcgtactcaatgcgttcctgttcactttgctgttccttctcttgcttctgttgacgttggtatttcacccattctgcgcgctgcttagcgcgctccatgacgtggaatttgttctttgcactttgttgcagctcttcgattctcttcgtggctgaagtcacgtcgtcgataccctcgtcgcgaagcaagatagtgtattggtcgaccaaacgcgtgaagaattggtagagactatgctgtgggcgcaagaagtcgaactgggaatttctggcctcgcgctgcgccagcgcggtcatgaatgacttcccccgcttcgcgacaaacatcgctgtgagcttcaccacctccaaatcctgcgcattgataataggcatgcgcgcagagaagtggaacggggatggttcaggtggtcctttgggcttttcgggttccgcagcggcgacagcctcgccagctcgtgctggtccgactcgacctgctctgtactcggcgatataccattgatagtatggctcgtaggcatctccagcattcaggaaagagaatttgtagttgttcctttccctctcgcggatacggtcttcgaagacacctttatggcgaacgacatagcttgctgtggtctcgatggctttgcgaatatccttgggaggaagaaccataccctctggaggcttgataaccccctcagacccctcagggcgaggtgtagttccattggatggctccatggtgaatggcaaggatatgaagagatagaggtctcgccagtaggaaagcaaatgatggatccaccatttcaccgccgtaaagagtggcattttgacggcggtgggagttttggcggtgtgtgttgtggcggggattggattgtggcgtgggctgtgggattgtggcgggtgcctcccgtgcacgcggccatgttcctgtgttctgcatttgtccacgggaatgtttactttctcttttttatagtcaattgatttctagatcatcttatatacatgtagatatctaaaagtatggtatttcaaatctacatgcgactggcgtactctgtagagcccgttaaaacactaggggctaaaaactaaggggctcacatgttgtcctccacagccgccgttgatctggcctcaaggcggaactgcacactgcacgctttcgtccatctgcgttcactccagttcttgattctcaactttttttttttctttcttactctctcttcaacagccaattttctttagtcttttacttcttccctgtcatggggcctttttcctcattattacacgatcattaattggtgtgctgtttgaagctattgaacggttgacagctcgaggtcgaacatagctcccgatagcatccactcgtccatcgaaccctgagaaacctctcattgacaattcaaactataactcaactacacgcaatcctcatatcgtttctcctcgacagtccgacttcgattcctactcccgcgccgttctcctgaaccgctgacgtcgtatcgaaacaatatgggccagaaagcgcaagacacgctggccgtgcggccacagagccgtggtaggcgctcgcccagtcggtcgcctaagcccaagaaccgcaagcctttggcggtgcctcagacgtatgcctcggagggagtgaagaacaatgacatcttcaaactccccggctcggactatagacttattgtactggtaactctgatcgccgcagctgttcgcctattcagaatctatcagcccaccagcgtggtcttcgatgaagtccagtacgttccgcccaagcttgtgttttcaatcggaataaaaacaaacagagactaatgattacgcgtgaacagcttcggtggatttgcttccaaatatatcaagggaaaattcttcatggacgtgcaccccccgctagctaaactgctgcttacgctggctggttggttggctgggttcgacggaaacttcgacttcaaggatattggcaaggattatttggagcccggtgttccttatgtggccatgcgcatgcttccagctattctgggtgtcctgactgtcccattgatgttcctcaccctcaaagttaccgggtgccgaacttcaacttcagtcctaggtgctggtcttgttatctttgacaacgctttggtcactcagtcccgtctgattctgctcgactccccactgattttctttaccgctctgacagctttggccttcagctgcttcaccaaccaacaagagcttggaccggcctatgccttccgtggcccgtggtggttctggctcgtgtgtaccggtctttctcttggcgcaaccctgagcgtgaagtgggttggcctcttcactatggcttgggttggatctctcacggctctccagttgtgggtactgttgggcgattctaaaaatgtcacaccggtatgggtttccaaattcagatcaagccgtgttctatgctaacagtaggattcttacagcgtctgtggttcaagcatttcttctctcgggtattctgtctcattgtcattcctctcggtttctacatggccatgtttgccatccactttacatgcttggttaaccccggagaaggtgacggcttcatgtcatcggaattccaggcaactttgaactcaaagtctatgcaagatgttcccgcagatgtctcatttggatcccgggtcagcctccgccacctgaacacacagggcggctacctgcactcccaccctcatatgtacccaacaggtagcaagcagcagcagatcacgctctacccccacaaggatgagaacaacgagttcctcctggagaactcgactcagcctctaggaccctatggagaggtcgagggcccattcgcctgggataacctgactgctcctggtttcattgaggatggttcgattatcagactttaccatgtgatcactcaccgaagaattcactcgcatgacgagcgccctccggtgaccgaggccgactggcagtatgaggtctctgcctatggatacgaaggcttccctggtgatgccaacgacttatggagggttgagattgtgaagtccatgtccgagacccccgagtctaagaagcgcttgcggactattcagtccaagttcaagttggtgcacgtcatgactggttgtgtcctgttctcccacaaggtcaagcttccggactggggatacgagcagcaggaagtgacttgcgccaagggtggtactcttcccaatagcatttggtatattgagtccaaccagcatcccgctatggccccggacgccgagcgagtgaactaccggaatcccggattcttgggcaagttctgggaattgcagaaggtcatgtggaccacgaacgcaggcttagttgagtcccatgcctgggattctcgtccgccctcctggcctaccctccttcgtggcatcaacttctggggcaaagacaaccgccaaatttacctcctcggaaaccctcttatctggtggtcgaccactctggctatcggaatctatttcgtcttcaaggctctctccattgttcggtggcaacgaagttgtgatgactacaagcacacttcgttcaagcgctttgactacgaggttggcaccagcgttttgggttggttcttccactatttcccattctacctcatggcccgccagctcttcttgcatcactacctccctgccctttacttcgccattatggtcttttgccaagaatttgacttccttacaaaccgcattaagagcctggggcttgcgtcgaagcccttgatcggaaaggctctgatggcagtcttcctgggacttagcgttgttgtattcacgctctacgccccactcgtgtatggtaacccctggactagggatgcctgcaatcaggtgaagctgcttggatcctgggatttcgactgtaacacattccacaccgacgtaagtgttccggaatggaaacctcctcgacgaggttattgaacgaatcgacgagatcacgactgacataggcctttcgaactccactagttgagccagtacatcactcagtacgtgccgagcctatcccccgtggctgcctctacaaccgcagctcaagcaccacccccaccgccaccagtccaggctcaagagcctgcgcctgcgcctgcaggtgaggctgttcaagaatcagacccagcggccgtcaccgcgcccaagcttaagggctctgtggcgcgcgttgagtaccgcgaccaaaacggcaaagttcttgacgagaaccttgtagcctcgctccgagcagaaggtaaagtcaagttcgagactcgctatgaggctggtcatcctctggagaatgcccatgaggttcctatcgtcgatggccagctcgctcccccgcacccggatgtgcagggccagaatcccgagactgccagcgcgcccgaagacatcgtgccccctgagagccccgcatctgtggccgatggtaacgagcgctccgtcgagcagccaagctccatggaagccaaacctgccagcgagggcaatgatgcgactagctagtggccggaagataaaatgtaagaggagagtggattctgccatgtataatgagactccatagagtacttgtccatttctctagtcaatgttagcttttttttagtgttgccacaattgacagtaataatttttgctatataaaataatattaaaggtagtcagttagctggccaatctcagcgcttgtagctctggtttgtcaggtatggttctagattgctaattcaaccttgtaaccaagccagcaggatacggatctaacggaagaaagagacatattcccaattgactctttatctgaatacggatactatgcacaaatctcttgctatccaaatggcaagttcacgcagccctctcctctccccggtcttagtgtacagcagccggccgcgggaagcagcggttcgcttcattcgacttcttaaggcacttcttgtggctaatcaatagccgtttagtagtcccactcctccttgccgtacttgttgaaccgctcgtggaggtcctattagaaagaagctaatgtcagcatttactaccaaaacagcaacgcgatcacacatgacactttcaacaagttctgaagtgatccaaccaacgtatggcataaataagaagtatcagcgaattcatacctcgggcagggtgacattgggaacaatgacagtgttcatggcgctgggggcagcacggaggggctggttcttgtcgctgtgggggtggtactggtacttgtagaccttgccatcctcggactggccctgccagggcatggcactctcgccaatgcgaacgttgctctcagaggtcacggaggtgggcttgcggccgaagtacctatattatcgcaaataccgaactgattagcgaccgtggtgattattgtatgtgtatgcgccattgagagtgataggtaggtgaggtaaaccccaaaagaggtgccgacgtcacagtggcggaaatggggcgacccagggacgaggcattgtagggcaatttcgggagggatgctcaccatccggcaatcaggaaagcaccagacatgacaccgagaaggacctagaagtacagcagttaggacgaaagatcgagcatggttcaatggctccgtgggatccgtacgtagagctcgggatcacgcttgccggccttttcgaggttgccctcctcgaccttggcggagctgaagcggcgcgggggagcgcggaggagggactggcgggtcagagcccggcgggtagccagagcagcaattgaggacatggttgcagcaattcgagcgtgcgttggaaggataattcgtgggcagagaactggagacgggatagtgggagagaatcatgaacgtcgaatgatgttgccggaatatcaggtgacgctgagtcagcaccggttcaagcaatatgggtcacgactttcgagcttcctgttggttgatattctatggttcaagttatctgacttgctgacgcataaacgatcattcggtgttgattctgtgatgtaattggccttgacgatttgtttggcctctcgatcgctgtttatgcctgaggtatggtgttccggttctttccatcaggggctctgtcttggccccggctttgcggcgcgtttgttaatttgagcctaatgggattataggaccttgattaatccgtctattcacttcgctcattagttagacattgtctcggctccatcgtcactcctttctcagctccgcgcgctgctcaccgtatcccgtcgatattaactgcctacgttacaccgcaattcgcttccatcccttcgccgttgccaattaggaacacaatatgatagcgtgcatttacatctagcaatttttaatattcacatcctttcatggccatggaaaactccgcagatcgtccagagaccggcgacacaaaccaaggatcgataccgcaacatgtactagggattcctcgccctccctctgttggcggaatttcgtcccgagtgacagatgaagatggagagcgaacaccatcttacacatcacctacccagtcgcggttctctgctacctccaggcgtgctcctccagtgcggaactccatcaatgcacccagccaggtgaccagcaggcctggtagctcgggcagtcgtttgagtagaacacatataccgtccctgacggcacaggggttttttcggcccatgagctcgcaacgattgcaggcacaccgaggaacacgccctgcgactaaagggacgatttcatccaccgacgactggacagagcatggaagccagaacaggaggagcttaatctctaatactagcacagccccgcaagtctctcagcttccggctgatatggaagctcctccgtctcggggaacagagttcacagattctatcattccagaccgcaacacctccaacgctagccctgccggtaacacaaccatccgcagtctgggtgaaagcgtccgactgctgcgggatcgagatcaaaaggagaagccccagcgtctcaacctgggtgctaactatacagggaatgccgggcaggaggcaccgccaaaatcacccctttcattcctatcattgcaaaataggggcgccggacacaaccacgattctcgggctcatcaaggccacgaacatctttcctccgctggctcctctccgggttccattgacctgaaaaaaccccctctacaaaaaacgaatttgggcaagaattaccagtacttccttggcaacacattcttctgcggcggagggcggttccagaactcgagagacaagcctgtcaatattgcaacagggcttctaatcgttgtaccatcggcactgttctttggcttctcgtacgtgaattcgcttgatgtgaccactgggccactagctaacctctgaaatcagggctccctggctgtggcataatatctctcctgccattcccatagtgtttgcttacattttctacgtgtgtttctcgtcatttgttcatgcgtccgttgtcgaccctggagtaagtgactcgttcttgattgggtttggtgatcgctaacatgatatttccagattatgcctcggaatgtacatcctatgcctcaaccacattcttcggacgatcctctggcgcctggtccgccgacaaatgactgggtcatggtcaagcttgctacttccgatgtagctgccatggacgtgcctgtgaaatactgcaagacatgtaatatctggcggcctcctcgctgctatcactgccgtgtctgcaacaactgtgtggaaaccctcgaccatcactgcgtgtggcttaacaattgtgttggtcgccgaaattatcgctatttcttcactttcgtcagctcttcaaccctcttggctctctttttgatcggtgctagtctggcacatatattggtctacagatctcgggagagcatatcatttggggctgcaatctctaaatggagagtcccatgggccatggtgatttatgggttggttgcagtgccataccctacatcgctttgggcatatcatctcttcctagttggtcgcggcgaaactaccagagaatatctcaactcgcacaagtttgccaagactgaccgacaccgaccattcacccaaggaaacatcctcaggaattggattgctgttcttgggcgtcctcgccctcctacctacatgcaattcaagcagcggtatgaagacggtgaccaacgcttagactctcaaaagagcaaatatcgcgtcccggatgtcgagtcccaaggtattgagatggaacaagttggtccccaacaggattaaaacaaaaagtcgtttttttgcctgtcggccttgtttcgacggctacgatctgtgaagatgatatttatgatttcctcttttttgcttcccaataattcctgttcttactcataccagcgcatctatcactttctaatcactacattacacatacccttcttgtcgccatccctctttgttcaatttgctatacctagcgcagacataattctctcattctactgatctatgacgatctatttcttatcatgttatatgctgttacttgttgtgactacatacctgggaatcggtaaccctatccagaattagcctttactttccacgtcctattaggactatatattcaccgttgcttggacatttgatatcatccagtgtatgtcacggctagaataacagtccatatatccatatcatcccagacatagattctctcatgttcatgtgggggcgagagggagcgatttcggcattcggcacaagatctagcattgtaagccctggaagatgcttactcttcccttctcccttatcccttgctttcttattcttcttattgcggtaatattcttgtacgttgggacattctacgattggagtgttcgaaagggttgttgcacgcgtcagactctcgccctaaattgataagaagcgcggcgcgggaagctgatcctcttcgatccaccatcttcccctggtattaccccaaccactttgaccacacgcggcagttgttctacatcgatagagaaagggcggttccaggtggaattgtccttcttgttatcccatcctctccaaaatggcgccacgaacgtcccgatcaaccgcgtccgcagctcccgatgcccaggctcacgagcctactgaagacaacatgagtctcgacgtgccagaacaactattgacgcctgaaaacagccgctcggagacttcaagcaacaacgagaacgcgctgaccgacgaaacatccgcaggacggcgaaggtcaacacgggttactcgcgcatcgtcgcggccgagtgagccactggaggacacacctgagaacgaggaacccgcagcctcatctagcgaggcctatgtcgacagtcttgccaaggcgaaacgctcgcactcttctttacgccacagtattgcagtaatggaatcttccttgcggagcggaaccccagtcaacgatgatactgcggccgacagaactatggcccccgacacgcctgtctcgaggtcttcccagggcttgcaatccgaggatatgaatatggcgcttcagcagcggacgctacgaaaccgtgtggggaaggaattggtcgaagacgaaggaacgaccacggccgaactagtcccatcccgaacctctccgcgcaaatctctacgacggtcaggtcgcttcgatttattgaataaggcttcagatttggtcctccgggccagcagcatactgggaaagcgcacgagaagccagacagacaaggatctcgatcggcgtagcagtctccgctctcgcaatattgtcccgtcgaaagatgaaacggctctttcgacagccaacgggccagcatcgaagaagcgtcgggtatctgagagcgacttgtccaaactccgggatcaggatagttctgaagaggaaccggctgtgcctgcttcgtcgcgacctaggcgcaagatatggctatcacatggcctctatacaggacaggaaccctcagactcgcctcctaagcagcgtcggagtaagaattcgaagaaaactggaacgggtcccatgcatcgcaccatccttcctatgcctatgttcaaaggtgctcggcttttgaagactggacgggactacctgctgccgtttgatatcttttcaccactaccacctggccagcctaagcctgatgagtggcgcaagactaacaagagtgagtgacgagtatcctacatcatgaagtgagggctgacagacagtctagatgtttttgttggtgatgccggaagcttctggaaagccaacaaaaaactcgagctgtctacttgtatgtgtaccgaagacactggctgtgatgataactgccagaaccgctatatgttctacgagtgtgacaacggtaactgcaggctgggtcccgagtgcggtaaccgaaatttcgagggccttaagcaccggaccaaggccgggggcaagtataacattggagtcgaagttatcaagacagcagatcgcgggtatggcgttcgcagcaatcgttccttcgagcccaaccagattatcgtggagtacaccggcgagattcttacccagcttgagtgcgagaggaggatgagaacagtatacaaaaacaatgaggtacgtgccctttctgttgggctttactacttactgacatcgtgaactagtgttactatctcatgtattttgatcagaatatgatcattgatgctactcgcggttctattgctcgctttgttaaccatgcctgtgagccaaactgccgtatggagaagtggactgtcggtggcaagccacgcatggcacttttcgctggggatcgaggagtctcgacaggggaggaattgagctatgactacaactttgagtgcgtattacatgcatatcaagctacttgaccatgcgctaacgatgtaccagtccttactctagcaagaatgttcaacaatgccgctgtggatcagcgaactgtcgaggcttccttggtccccgactaaaggataagcagcaacgtgccaaagaactcgagaaacgaaaggccgagggaattcagcaggcaactacaaaaaaggtcatcgataagaagcgcaaggcctcagaagaagtcgaaagcgatgactcccatcaaggtaaaaagcgcaagatgaccaagtccaaggccatcaaggccggcgtgaaaaaggccatggctaccgttcgtgggaagaaaacaaccaagacaacggcaaaatccaaaagcacaaccactgtcaagtcgaagaccaacgtcaagctaccaaccgtgaaagctacaggccggatgaaggccactgttcgctcttcccggtctaacaaagcagccaaggaacccccggcttctcccaagagaacatcccaactcaagaggccttctgctgagactaagaagcaaatcctcgctgctgcttccaaaggctctggggcttctccccgcaaatctgcgaaaaaggcccctacccagagccccgtcaaagctaagaagcctgctcctaaggctaagagcactagcaaagggagatttggcaagggagtcaaatctgcggctcgccgtgttatgaagtcagtgaagggagcaaggaaatgattgatctctggtcagactacggtcgttattgctgttacggacttgcttgaaagaaccgaattatttgcgcaacacatttttgctgtctggaatcctaggtctgtattctttgttgaccttaatacttgccagtgatccattcgttctattctatttgataattttctggtaatttattctttctatggctaaaattcgggttggcaatggtccccttgctcgacatcgtgtcttccctttgcttcctttcgatttccctgtgcgttttatttactatggcttcatgattccttcggtcttcatttatgcgtcacggttatgaaagtgagagattctgatatagccagggtaagatgcctctgaattcaacatggtttcccctggaactctagtactccatagctcattggatgcatttgtccatgtttctttccccaagagctgtcaactgcaagactattcaaaatcctacaactatcgagattcagatcaccctacgatatgaccctactcatctatcctagccaataaatcgtatagtgtaaaaggttagatcatcagaccaaatctattggcaaattgaaactatctaaaccaggggaatccatagaaaaagaaaagaaaaagcccacgagttaaaagccagcactttgttctatgtgcggcaaaacattaatcgactccaacaagcctcgcgcaagctgagaaattttaaatacgctccaggaagccctggctctccaagatgaggatgatctcgtgcacaatgctgcgcacactctgcttggagaagtcgacaacgagatcagccttgtcgggagtctcgtaagggtcatcaacaccagtgaagcccttgatttcaccacgacgggcagcatcgtagatgccgcgcttgtcggacttctcgcagtactcgaggggagtggcaacgtgcaccaagaagaaggagccagcctgggagacggcgtcgcgcgcgaacttgcgggactcctcgtaaggagcaatgggggaggcgatgacagcggcaccggcacgggtcagctcggtggccacgaaggcaatgcgctggatgttggtgtggcggtcctcgcgggtgaagcccagctcggaggagagctcgtggcggacggtgtcacccagcaacagggagacggaacgaccaccctgctggttcagggtaacctgcaaagcacgggcgatagcgtccttgccggagttcatgtagccagtcaggaagatggtgaaaccctgggtggcgcgaggtgggttggactcgcgcagaattttgacaacctcggggtaagagaaccactcgggaatatgggcaccggagcgcagacgacggcggagctcggtaccggagatgttgagggtcttgacgccagcggggacctggtcaacggggcggtactcgtcggtatcggggaggtaggtgaccatctggaattcgacaacctcgatgccgagctcatccttgtacttctcgacggcgtgttgagcatcgtagggaccgtagaaatcctcgcccttggagttggaaccaggaccggcgtggtcacgaccaacaatgaagtgggtagcaccatggttcttgcggatgatggcgtgccagatggcctcacggggaccacccatacgcatggccagaccgaggagacccaggacggccatgccgttggggtaacggggaaggagcgcctcgtatgcgcggacacgggtgaagtggtcaatgtcaccgggcttggtcagaccgacaacagggtgaatcaggacattggcctggcgggaacgagccgcgcggacagtcagctcacggtgagcacggtgcatggggttacgggtctggaaagcgacgacgcgggaccagcccagtttgtcgaagtggacgcgcaactctgcgggggtgtctgtggaaggattcattagccagattcaagatcaggatgaagaattgaacatacagcggagggcgacatagtcgtagtggttcagcttgttgacagcctcgatctttccaccaatgtagaactcctcgacggagttgttcaaatacacgatagccgggtgctctgggtcaccgccgaagacaagcttagcctctctagtcctaaattggagaaccgcgtcagcgagccccactatagcacgaaccacatcgactcattgggtaaagattgaagttttgtgacatcaaatggtcatgataaagataaaacagggtatccgaggagaaataacgatcgacagtgcgaccggtttcggcaaattgtgaaagagaaagggaaaactcacttgtcggggcggtaaatgtcatcaatggtgagaatagccaagttacggtcgtcacggaagtcacgcagagtgatgcgagtaccggcttggagcttgttctcttcgataacctttttgctagcgtcaagggtaatgggcatagagaaaacattgccatcggcaaggcggttgtcctcacagacactatgcacattgtcagctgctgctgttgtatattgtcgtgcagaatgaggggtttctcattccaatgggatcatctgtatcaaacataccggtcgtagtctgcctggttcatgaaacctgcacgaaaattagtgattgtcctctatgcgcatgttcaaagagaaaggtcatttgaatctgagaatgaacaatcgcacttaccctccagaggagagaaacctccgttcatgatcagctcgagatcgcacagctggcgctcggtcagcgtcacagcggggagagtctcggcctcggcggcgagctcggcgtgacggggagcatcgcgagcgagaaggtccttgaggacaccaccgtggggggcgttggccataatgaataataaagaacgaaagatggaatatgaagagaagtaatgtacaagaaaagaaaagagggaaagggtttggttatcaagaaatttcgagtatggaggggtgtggattgcaccatccacatccaacagaagtcgtcaacaagtggagaccggtggaagtcttggcttcggggtacaggaagttgtttgtgctgttgttatggattttatatggatcttagggctattagggctattattatcttgtgtcgaatgccttattcagataattagcactatacaacatatatgtctttctattttagtagtataagggtataattctgatattctgatcatccgaagaccgatctacaacgttgtataactattgtacgtactgcagtttcagattgtcagattttcaggggcaatagacacccctagaacccctgactgatatcatagaggctttgcttctaaagaaagatcttgtaccccgtagtacgtaggagtacacgtacacttagtatacaaccgatatacctaacgctatccggaagtccaaaagcggcttagctcgacgccacatctgcagaggctgaggtcatgtgaccaagcacgtcacctccgcgcggaatcacgacatcccatcccccaattaggaatagatcgcccgggtgatctgaaaaccctaaatccggctagaattccattaatatacaacgccaataacccgatatattaaaactatggacactatatacatctttccctacatattttcactccgccttcaccgtgctattgggaagtgtgatggtcaatttctcgaaatccacagcaaacgcccctaccttcatggccggctgagtcgcgttcgcataggaatcggccaggtattcttcgatgtcctcctccgaggacagagcggtgtcaagcgagcctgtcttctgcagaatatacaacaccgcaattcgagaaaacccaacaaccttatcgggaacgctgatcgcagtggatgtggaggcagcagcagcagtggtttgagagctggccttggtagcggaggcgctcgtcgcagactcggtttgagtgggtgccgacgtggttgtagctgtcttgcttgattccgagtcgtcgtataggataccgttcatggtggcttcggaacggacagccaggactggtgttgggtcggttttcgacacggatggcatcgaatcggctaccaaattcacagatcgtcgggtcttgcttgtgtcggttgtgacagcgctgaaagctacgagcgcgttttcggtcgtgcaggtgacgtcgttcatgttgaacagagccatgattgtgactgggtcgagggtgatgttgaatttctccttggattcgttgaacagaacaggaagtgcactgcccatggtcgcgttcgatccgtcacttatcagggcggtggtgcagctaccgtcacccaaaacggtgcactgtgagccgatataaccgttcgaacaaatgcacgagcattgggtgccggctgagacgcttacacctccgttttcacaagggttcttttcagcacagggcgtgctcgcattctcgcggggcacggcgacaaggaacacggggagaagaactgccagaatgacaatgatgaagattacgacacagatgagcacgaagatcttccgaggtattccacagcatgtcttcttgcgtcggggagcattagggtcgtcgtcgctcgagttaagctgctcgacattacgcaagttagagcgtccaaagaacacgggccatgatgcggttgatccgcgcgcttcgggtgtcgccaaacccggcgggggaaaggaggcaagcatttccgataaagagccagaattacgtggtcggtgtcctaagcataacagcagttagtactattttcggtttccacatagcctggatccgaaagactcacccatccctttgaatccagcctcatcaccagccagattggctcggctggcggttctcccatgatccaggttcgatgcgagctttgtcgccctccgaatcaaatcagataaactggaaagactcccacgagcctctgcatcccgcaacgcatgcatattcagagcaggaggcttgcgaccgccaggcctcttgtcactcattgttggtgcagcgttgggcagctgtccgaaggcctcgagctctttttcgagttgtgcattggaggagagcgattcatgctttgtggacaagggaggtttttctaagttcaggcctttcggtggttcactcgatgtagtagacgactttcgtaattggcttggtatatggggcgcctggcttgcagcagctcccagcccgacagaccgcgccgtggtgcccttggcggattcctcctgggtaggtgctggcatgtctacaacggaaacagggttagacttgaggatagtacgcatcgtcggctttcctcgctttccaatactggcatttcggacaagcctcgtatcgtcctcttggaagccaggtgagcgctggccatcgtctgaatctatgtcgtatgctcccagaatctcggattcagcgggaccggatccccagcttgggatggctcggctcgatgcgacggagcattttgtaaaccgaggatgggcgagttcttctggaatgggcgaaacagatgatcgacgagcccgagggggccgtcgcgaattcagcggtgcgacaagacctgccgtccggtgtctaggctcatcctgagaaagatcggactcggctggcagagaagtgggtggaaattggggcatatcggaggctacagattgcctgaacaaatcttccgttgcgatcgatattcgaggagtcaggtcgattgtgctggtgggactggcaggggtattatctatcggccggtgagactgcgctagcgcagaaggctgaggttgcgaggaggaccggggaggtaatcccatttctgaaactcggctatctcgttctgagtaaatggatggcgaaggcatttcacccggatgaggtggtctctgaggtggaggaccacgcggaaccaaatacctaggatgttgattggccgggtgtggtgggagacctgtatcaggaagaggccattgtgcctggtgggagatattcctagggacgggaggttgtctcatctggggtggcgaggctctttctggacgcacgccggcatctagcatttgcctggcccgtttgacggatcctttcctggcaggctcgccagagggcccggagtttggtaagtcagtgctcattgagaagtatggctaacctctcacgagaagttagggctcgcagtgtaggaagtgtggcgtggtactgctgtccaaaagagagacttgtctcttaaatattgaatgataatgaatgattgctcgatgccttgatcgagctgaaaaaaaaaaaaaaaaaaaacgaatgaaaagatatcaaaaggattgaaaccagagaaccggggtctggccactgagcaagtgtctacaagattgtagagagtggataaagcaatgagaacgatctagcaaggcgagatccacaggatcaagatcgcaaacgaatggaagggcattcaatgccactgtataaaatcgtcagggccagcttcaagtcatcgtgaattggattcggaagacttaccgttgaaaaaggggactgggaaaacgagaggaaccgctagtatcaaactggcgttcaaggatagattagccccagtctttgacctggatagactaccaattcaaatggggagagcctcaagctcttctaagggtgggaaaaaggagagaaaagaggcattgaaactgacacgaccagggctatggaagctagtccacatctcaaacgggaagtatattaaggctaaacctcacggattaatctattcttccttgatttcgtgcacttccctgtcgtataagagtacgaagttgcatatatccaaagactacgtagtccatgcatcctgcatacttccaacccccttctgatctgcatagcacacatgtcgcttttcagcattgtacttttgtagcgaaaagtagggaaaattggaatgaaaggtcaaccccctcaacatgagacggccaaattactccgtagacgaatcacatctcgactgtatcagtggggttggtattagtcccggacgctaacgtctcatataaaggctcccttaagtaatttgaaacttgttcaatgagttattgaatatgttatagcacatttatatccatgcattgcatattgtatactccataggcttatagactccatagcacatgggactaaaagacgttgaatgcaaaattaaaggtgcagggcggctataaactccgtactttgatagactaggctttgcactgaaacacctttagccctacttggtattagccatttacagccccttaaatgaataatttattgtacgatagatatttctccgctcgagtctatgcatccacagtggcctggtctgggcccttccacatgaacagttcatcatgaggatatattgtacatggtttcctgagttcaacttttagatatgaggcatttgcgactcccaattttaattacatctggtcatacaaggtgatctccttggaaccgcaacaatataatgctttgtgcgacctgtcaaccaacttgaccttgcgacgacggatcaaccgtgcaatatcggacaaagtcacggatacctacaacatagtcgcatcgggggattcgatttccagccgagcccgtaattcgcttatctgctgttccagcgctcgcatttcgaccgttgtactagccaaatccggcacctgattgtctatcgcatttgcgaaagagtcctgcgccctgcgcagcgactgggggaccaatattccataccaatgaattggatcagtagaacgaaacttcttaggagcgggctctggtttctcgacaggggtgatttcggtttctgcagtgtcagagggttccgagctagccgtctcagccgggctggtttcctcatgtccactctggaccggagaagaagctttggtctcgttatccccatcagcctcctctagtggatcactggttgtacttttgatggagaatgtgtatccaggttcaggtggcacagtgatatcccctttctcttgtggatcgttcgtgggtttctccgtgtcttgttcggattggattgatctgtcaatttggcccagttaacaagcgccaggaatcaatgacagcaggtgaagttacatctttctcgttgctttcatgcgcccatcgtaataatcaggaccataacggcggccaggaggactagagaagttggcctgggcgagagcaaagaacccctactttgtctcagcatatttcatgaaccatgattgacagcgtcataccgacgacagatggcctgccagacttgactgtagtttctgctgccgatcaagcagatgcaagtatttctcaaggagtgtatccaaacattggactgaatcctccaaagctacaggtttcacctgcacttcgggtgcctccgagcccggtcgcgacgctggtggcgtgggtatttgagccatggagaaaagactaaaggccaatgaagcagatatgcaatgcaaatatccacaaaaccgagtgacttgacaataagtccgataaatcccaaaagcttgagatacagaagaaacgtggagcaaaggagctcggccccggtaactccgtcattcgtctccgaacccaaaagaatttcccatttctgcgcttcttcttctctcttgcatacttcaacccactgtatctcttgtgttgtaagagactgtgctactattgatcaaacccatcgattcctgtgcgatttaatttcccccgaatctttgttcttgcaagatcgaaccgccaccctccgattgcgtttttgatacgagtcattgcgcccaacgtacgtgaactacactctggtatctcgaccattgcaatacgaacggtcgctctaacccagcagctcttaggaccacttcttgccgccgcagcgccgtgtcgaccacgcgaccaaggcatcggtgataacctgggttgaccaagcaggcgtcttgcactactcacattcggctttttgactctgattaccacttggatcctcttcaaaatattatcataacttcagctaccatgtctgtcgcgtccctgcaccgtgagactgccttccaggcacggtctttggtatgtcctcttgactttatatgcgcttcaacctcttgtgtttgtccttgatgcatcaaactaacgagcgtctttctcttttcattagttccgctcccttctgcgctattccggacagttttccaactacaacttccgtgaattcgctcgtcggaagacaagggattcgttccgcgagcaccaaaacgccacagaggaacgccagatacaggaactgatccaggagggacttaagagcttgcgcatgctgaaggtcagtggtgttacatggctttctcggggtgaaactcggtcggtggcagatatcggggatccatcctcagccccgcatattgaaagtcgacgagtcctcatcctaccacactgccctacaaatcatcggatccaaatcttgggaataatatactgacatagccacagagacaaacgatcatcagccagttctaccagttggataagttggtggtggaaggccagaagacagtaagttctaccttggcttaaggccttcctccagcactcaaacttacattctctttgaagggaaaggaaaccgggaaccatggaggtattgtccgccagaaggatactgggtaagtcattcaaatgaagctccaacccaccttctgcatgtcactgacttgtagtagttgggattgattcttagacgttggatgggaacttgttattattccattgtgttttttcgataacttgccactggtggactaattaaacacctgctcttttttgtatttatacacccagcgatgcagctgcagctgtagctattcttttatcaagcaccagaaacacccattccactcctgaatcacaaaataaatcgcttttacttgaacaatttgctttatatcaattgagggacactgtcacaatatagatagctgccatagcaagatattgcatcaatgttcaataagtatgcatcacgtgatatctctttacggttctgtagcatcgcaacgcgacttgaggtgcactgcactgtaccaccacacactccatcacatcgcgctaaagaatcctgcccaggaggtcgccataaggacattacaagctttctgatcgggtgcacttgcctttgaatttgtataggggcatctgccatgccttccacggtacgtttcaacttgcccccgtggtgatctagcgccgacctggttgccctagacacatggtcattccagatactagatcttaaaattctcgaattagctagctaaaatccaccacagttcagagcctcgcgctcagggcgacacctcgatggtgccccaaaccgcacccgaaccggccaaatcgatcacgatgtctttgagggattgccagtgcgtcgctggtcccgacaacagcacactttctctcaagcgcctaaacctgttgagtcggaattcgccgttcaaggtccaggcggcgggccaacgctaccagagctccccatgccaagagacagccagctcctaccgccaatcagtcgcgcactccttcgagcagcccgtgctggatgtatccatatcctccaaggtagtcgaacagaggatgaggataaaagcggagaagatgcggatgattcggcctccgcatctcatgtggctgatcggagcttcacaactcgcaaatggatgacgcttcccaagcacctcgagcctgcggaggtggagtttctggcaaagaggcgacctggtctttcatctctttatggcaccgttactactatagatggaagctccgggcccatgaggagaacaaaattcaagaaagttgatccccaaacaggcaacatctctatctacgaggcgtgggtgcctgagggccatcgcattgaaggagagattactggcgacttacagacatttgccgagcagagcaatgtgcctgtgaagcccgaggcgcctgcacctggaacaatcgtcgagggggtcggcattgtcaatgctgagggtgttgttgttgcggaggctggatcagcagctgtaatgactcctccaaaacgacgtccacctccacctaagcgaaagggcaagggtattggaaggggccggaagaagaaggtcatgtttgcgcctggcgaagggtctgatgccgcgacagtacatggagctggcccctctcatggcaatggggagggtgactacaagagagaaggtcagcaggatgcttcacgtatgtccattgaccaggctggtcaagatgaagacgatgaagatggtgacgagggagatgacagcgatgacggtgatgattcgatgatggatgcgaagacccctgatacaccccagcctctgtctggcgctgagtttgtgaatcagccttcattcgagactcctgccaagcaatcggttgatgtcgacatgtctgatgttgttcccgaaaaccagccccatgcccctgaaattccttcattaagcgaaaaggacgagcaaaaccagcccgaaaacacctcggaggtggatttcggtgccctgacttccaatgttccctcagagaaggcggaggtcaacgcttccgatgagaagcctgtcatttcggagcatgacaagactcccacttctcccaccacaactgccgcaacgacaagtgaatctaccgagctcccagctgcagttgccgaagctcaaagctcagatatcaaggtggaaggaggagaagaagccacagagccgacggctgaccttgcaccaaaggaggaacctgctctttcaaaccaacaggaaattgcgactaccgtgccacctgttgaccccgaaattccctcggaacccccagtagcacgaccttcgacccaattgcagacacttgagcatacagaaaccgagcagacggcagtatcgaacaatgccttggatgaggctcaggaacctcaacagatcccagacgagtccgtttccaatactgacacacaagaaacgctctcgatagctcctgatcgtgaacaaccgaacacctgcgatgctttcgggcccagtctacacccagacgaaacaaaagacgtcgcgatgggagatgccccgtcaccagaacaaagccaagggctcaatgcccagtctctcgcgaacccagaagtacctgaagcgccagagaccgaagagcatccacagtccaagcccactgcagcggagcccactgcagccattaccgcagacttcagtctattgaagagatcaacgcctgccgtagacgaagagtcagaaacagcaaccgaaacaagtgttcgtgatgaaactcttgccaccaaagcagagctgcaggaagattctcgatctggcgaagctaaggaagcccatgacgaacttgagaaactacctacgatcccacaggctggttcgtctgagtctacatgagccacttgtgagggctttattttctcccagccaactaatgtacaatgaatggcattggttttgtttattgcctgttgatgggattgtttatgtttgtggataggcgtataggatcattgtgcatcatattgtaggaccacatagtttattcttcaattcaaatcttttcttcgaagtgactccgtttactcgtgcttttttctctgttcttttgtacaatagacgcttatcttagggatgctgggtatgaatatataaattacagcatacatatagagatgagaagaaagtagcaagtattatttctccatatggcgaaattagcgaaggagaattagttacttcaaagcaaagccaaccctacaaaagtttcttcggaaaagaaaaactaccaggcaagttgctgaatatccttcgagatctgccatccatgcgccaatgcaactcttctgtaggcgtctactgcttcgcctactgaatagtcggtttttgcgctatggatatccagacgcgcgggtcttgggtcggtgctggtaatagccatgcgaacctgcaacaacaaactctcaattgaagtcgttggtagccagcccgagtgtgtcagcagttccatgcacatagatccaccggcggtaacgtggccgccgccccccgcggcggactggaggnnnnnnnnnnnnnnnnnnnnnnnnnnnnnnnnnnnnnnnnnnnnnnnnnnnnnnnnnnnnnnnnnnnnnnnnnnnnnnnnnnnnnnnnccggccgcctccagcggcgaactggaggaaacgagggcgaatgacccgtacaaggggtggatccatagggaattgccggggaaagcggagctccaagacgatgcttttttgtttggtctctttgaggtcttttgctagtgggagggatggatcaaacgtatgcagctctgcaatccattggtagactgttgtaatcaagctggggtcgacgtaccatccgagctcgtggagtggcactcgctcctgggtttttatggtagcctgaagatgctgctgtaggatttttgtggctgaggtagtcgcaaattggggtggagagagtgtaggcaaagaagtatcctgtagggttccgggtcggaaatcagtcttgaggtctgttgctgggacagctccttcttgcatgctaggacctgggggactttcacacatctcatcgtcagataaaagaatgctgagatcctctgtggtcgtttcaacgctgacattgtcgtcgttgtcgtcgttgtgttgttcagtatcttgaattgaatatttgcgtctcttgggtgacggcacaaggtctgcaagcccggtttcactagcggcatgaaggaagtttgccctttggccgctaaataccgagatgggaatcttgatctgtttgttgctgggaccgacagccggataacgtttatcttgtttatataaaaggctttcatcatgttgatacgatgatggctgggcttttgagctctttgacttactcccatgcgcatatccatcagttttctttgccataccaggtacgttcaagtcacagagcttgacgaaaaggtaccttggttggatccaatccaagtgttgcacgacgtagggactacggcacacaaactgattgggagcattgacgacctcattaagagaaatcaccgtcgcgagctccagccgactcgcggacaacgtgggagatgtggaaaacgtgggaagaaaattcctaccacagtatgacaatgaggtatggaagtggttcgacatgtaaacaccatgaccacaggagcggccatggacaacttgcttgaaatgcaacccctcacgtagaatactgtgccaattatgcaaagcgctgccatgccaagcgaatatagtaggatgctttggattctgggccaaagaagtggagttgaccgcttgaagaaagcgctgctctttgtcgacagcaccttgaacaagtctgaattgcatgtagtcgcccattccatctatctgatgccgaggctcatcgacatcttgcttgatgaaagatcgatttgaggcgacaacccagcgtaaaaggtccaatccagcaggggatatgacgtctctccaggttgaaagaagcttgccccttttgtcactcccaatgaatgtcttcatttcctcgatactaggtagtatggccaataggcaagaaatcatccactgtttctgtgtggatgccaaatcgtctagattggtgtcataaacaacaaatctcacttgctggggctccacccctagcacctctcctggctgcactcgacggcctctactaattggacatgagatgcgaatatgatttaacgtctcgccaatgtgttcaacacgacagtgccattctgcaggttttggagtcttcataatgaggacaatccaatcgccgactttgaccggagtcggctgatctagccgaatttcaagatcggttgcatcaaattgcccgatataatttgtagaacaatctgaattttctttaggaagtaatttctcgggtacgcgtagccgaagaccagttgggaagtcttcaagaagccccgctgaagccctcgcgtatgccaggctggttagcaagtcaacgacaaagggctgggactgaatctcatactcaaggcttgcacccaggcccagcgccatgtattggtagaggcataaatcattggagcaaacatatggcttcagtgattcgaaggcatcaccagttttgcagtggcaaactaagcaaaattctgtgcacttgacaaaatgccgcagggtaaactgcatggcaagaagaggaaaagacatattagagatattgcggtccagttcggtcatatgatcagccaaaaggatttctggcgtcgacgtggcccagctgtccggctgatagtcctcctcggaaaagttctcagagctgtaatccctgccttggttgatctggaagaaaagttctgcccctgtccatgaaagcccatgttttagtcgaagactgatgatcccaagcaggcgctctctgataagtaaattgagcgattttccaatgaacagcggcctgaaaagatgaccacgtattgttttgtccgaagtcatactctcgtctttcgtccgttgatcctgtgactcctgtataacttccatagcgtgctctaaggatggcttgtatgagctgcaaaggccaacattcatctgaaccggtgggtttttcgaatcaattgctatctcgataattgtttggagttcatggtaagtcggtcgataacggatcagcaaaaccaaatactccgacggttcgacgccccaagaatccatagcttcctcggaaatgccaagcttggaaatgcggcaagacactgacacaataatatcgccatgttttaaccccaggtatcccactttgaatcccgcgttcttgaccacacgaaggtcacggcgaatcttctctcgtaacttcgtcttactttgagtagatgtgaatattctggtttcatcatcagactcccagcctggctcagtatcaccggcagtcgagtcgtcggagtcggagtcacgagagcctaggtcctctaggtaactggatgtcgaatcaggatcaaccatagagttggtgatcattttctcaatgttgcgcaacaattcatggatagttaagcctgtgaatgaaggcactgcattttcgagggaggagctgactgtctttggacagttctcggacgatgggaagaccaaaaagccatggtccctgggataatcgtgagagtctgcttgtacgtcagcaagagattagatccttgaaagatactatgagctagtaatattaattaccggaaactatagcttggagatcaagggtgaggcttgcctcgggtgctgcaaatgtgaaggaaattgatccatcatactcccctgttctgatatcggaggtacaggggaatcgtccagggaccgctgcatctgcgagatctcgcaggaattctttgcgtggcatagtacggtttgactgcgttgaaattttgaaaagaaggtggaaaagaagaagtaatgagacgcgaaagtcagtgtcaagagtcggtcaagggatcaagcctagaagtgcttcatgtatatcaaagaagtatatcgagcaaaataaagacacgatgagaaaagaatgacgagcacagaagaaaaacaaagagtaacggcgtaaaccatttggtgatttcaaccatgaccaggtacttaggcagcctcaggccccgattaggaatagccccactatcttaattcttatctaatcgggtcgatcggtcttggcaggtccactccggggcttctatacttcatgcattacggagtagacaaactcatacatgcaaacctacagacctaagctagatccaagtctacaggaaaataagagaggcacgaaggagaaaatcagaggttcgcttttgaggaggtctttgcgagtatcctccagagaaagcgccattttgaattctagttcgtgagatagtctaggtgctcccctcatactcacggtaagatgtatagaaagggctcgcttagggagtgtttcttgcctctgatgctagaacaattcagtccatgaatatgtgtcaacgaatcagcaggcgaagcatgacttctgtcacaagaatacagtgcaacagtgggcttgacattgaagacaatgcaaattctagcattcgaaactgatttatatctgtcaaggaactgttaaacttcgattctattattattatgcctatttcaattcgacctttccaagcattgcgtccgagttgcactacaacatctacaacggtcacgtgcatatcaaacaagacaaacattcatcaccaatacaagtaaggcttcatcaatctccaatcttttcagtaacacaatcatgttgccccctcgaagcgccatcggtcgaataccgagtcatatccggccaactcatctgcctcggatctccggtcccaacgtacatctccgaccattcacccaccgcacacgcctacttcttctttctccagcgccgggtcgccctcaactacccttcctatcacctcttgcgccgacccgtccactcccaccgctatcaatccacctccgccagcatttcggtcgcttgatatctaccgagagccgcgagcattacaagcgaagggtatcgcgaggtgtcaagatcggcctgtcagtgtcggccatccttgtcttgttctctgcgatacagctcggcatctaccaagaaaacattgagcattcatggcccactccaacagagtggtcctggaaaagccgctggtgtctgcgatctgcgcaggcactgcagaatcctgagcagatcggcaagctgatgacgaattggcctatggtcgctgggtatcttcgcgagctgctcgagcgtctggagaacctagagggtgagggcaaaggcctcatagaacagggtgagggtggattcctggtcgaaggcgtcggccacactgggttcgatgtctccgcaaagagtgagccttggcgccgtggatatttccaggccctgatgggtgctgccaaggctgctgagaacctggatggctggttgacagatcgcaagcagaagatatctgcgcctgcggaatatgttgttggaccctcgaatcctcgaccaaaacccatgcccgctggccagaagaaggtcccacgggaagaggattgtgaggaagcgtctccgtctccggagcgcttctacatgaagatcttgacaacaaagggctttgacacaaggcagaaacttgatgctgccttggcttatgctgattggcttgatttcaaaggcttgggccttacggcgggtgacatgtataagtgggccttggacattgctgctggtgggttgaaaggagatgctagcaaaattgtggatttgaagagcggtctgttgaagaataatagtggagagctaccttcagagaatattctccgtgtctccacggccctcgccgtccacaacgctcgtcaagccaatcttcccacagcgttatcccttttcacatctgttctcaaagcccgacgcagcctccctttatcgtcggactatgatagatctccgtcctttccaactctgcctaaatccaacaacgacccattctcttctctcttcaaatcgcttaaaaatgtcctcattcccgtgaagtacccagaccctctcccatcaggcgacgaacccccacgtcgcaccacggcatcagcctgcgaagaagcaggattaatgacctacatcggcgagatcctgtacgcctcctcgtcgaaggattccggtcttgcctggacgcgcgatgcagtcgacatggccgagtccacgatgctccaactcagcaattcagccgaccgcactgctcgaactcgctgcgcacagtgtctgaaagttgggctggagaattggaaaatcatggtctctacccttgttacccgtgctcgacaagaagagcagaagagcagggatcaggctaagggtgcttggtttggcggcgaacgccgcgtagaagcgaagcagctcgatcgtcgacgttgggaggctgaagatgctattctagaggatcggattcgtcgtctcttccctctcctcgagggcgagtccgggctggatctcctcgctccaaatagctctttgtttgtgtagtgttattatctacttgtatacctggacatttttggtggagttgaggtgacttttgaatatgtacaacatacagattatgttcgccatggcggtcaattttgttatccaatcagatttcccgtatatcaaaacccgtcgagctttgtagacctctgtactccgtacagtccagcgaagtaagcaaatcgacgaggattggcaatatcctatgttacaagtgtctatcattgagggttgactaaatcgaataatgtagtgtatgtcacaaagaaacaatatatttttctaagcgcgaagacgttcttgctaccttcaagagttcgcaccacagtttctttgtggcctgagttctatctcattgtgttatttgcgtcaacctcatcgttgaagttatatatatataacccgggacttctaatgagtcaagaaaccaacaatccgagcttcatgcgctttgagggagtgttcttgtatgaaaatgaagcaaatggtaagaaatatttcttatatttgaaacatatcattgtagacctattgagagacgtgtcttggtcaaatagtctagtcacagtctctacatagcggtattggggattacgatcagccgatgcaaattggaagcataggctttgagacaaatagatatatgatccaaaaagagacaaaagaaatagcagcaagaatgaatgttgactagtacatagtaagcttcgcctcgctctgtcaactggaccttgagctccccaagcatttgactgtgtttccacatgggaacgacagtgtggtatatgtacatggaagagccaaccctgacacacactcaatgatttcctggcggattcgaaggggagtctcgagtatatggaaagattgcgagcggcctaatttaggtggccttgtccttgttgtggtagttcacatcggagttccagctgtagatgagttagtcctggggtttcagggggtgatgtggaatgtcatgcgatccggttgagaaagcagatcatcagatgtaagattgcagaagctgctgttccgcagaacaatgtatagtatgtggtggggtggaaagtcggaactcacaagatggtctattccggacatagattagctcgagtcttcagcacacagcataattggatccacataccttatcaccgtctccccaagggaagttcttcgtgcggatgttctggtaagggtactcggtgcgctcctcgagcgggggcatgtgcgaccagtgctcccagtgctcattccagaggttgtaggcgttgagaccaccaccaatcaggcagggaatcacggcactatgaagtaattaagttttaggtaagagtgtcaaaccaaggagtggattgaaacgtacaagacggacagcttgagccagaggcctgtggaataatcgggtcagtaatggatattatctacggccaatgaccatgctgcacaatcaattgagttaattgtagggtacatactgctggtagaggcagcatggtgcttgacggcagctctctcgcggttgaattcgttgtcgacgatccaagaaggcttcgcttcggcgctgttgaaacggcgctggatggtggagcggaccggagcggaacgcatctgctgcgaagcacgctgggaaaggcgaccgatattgcgttgagggaacatggtgggtgatgctaaggagatctcttagtggtgaaggtcaaaagtggtgcgatgaggtctgaagccgtctttagcgtatccccgtgatctcccggattatgtaacctgatgtcatgaggccttatatatcaggcagacacaaggctactagaatcacgtgatggttttgaatatgtatgaacgtcgggatgcaggtcccgcaaccaattaactagattgaataagtaagggtggctctaatccttggctgactcgatcttttatattgtatttcgacctgtcttgatcatttgcatcgcaagaaatgccgcgttgtccccggatacactagcgcgtccaacatgggagttcgcataaccacgtggaatggtaagtcctatctgaatcatcgggagctctgagtagtgaatatataccaacggcgcataaccttttagtcaatggtatacggtatgaaagaaacctgctagttgaaccggttcaacactaatataacaaaagaaacccgttctcctatgagccatggagaggaacgcgcacatttgaggtaagtgtatatccttctatttcacagtagccgagcttatctagtctaaagtctatgtttgatatactggaggcggatattgtaattctccaagaaaccaagattcagcgcaaagacctccgcgatgacatggtcttggttccaggatgggattgttatttcagtctccctcgagtcaaaaaaggcaagctaatgctccattgctatatatacagaagattaacagcttttaggatactcgggtgttgtgatctacacgcgcaatgccacttgttctccaataagggcagaagagggcattactggggttctctgcccaccaaaatcctcaacatctttctgcagtcttccagaagagcagcagattggtggatatccaacgttagatcagctttccaggcccgcaatgaatctcgaggggcctgactcggaagaggagcaagagtatgttagctcggtgcccaataccacaatagatgcaccaaacctcgactccgaagggcgttgcgtcattctggagtttcctgcatttgtccttattggtgtctactgccctgcctatcgggatgagaatcgagatacctttcgcatggactttctcaatgtcctagattctcgaatccgaaacctgattgcgatggggaagaatgtggtcgtggctggggacatcaatatttcgaagcagggcattgatgctgctcatggaattgaggccatacgaaaaggtacaatgaccgaggaagaatttatatctgcgccttctcgacgcctgtttaaccacttgatatccgatggcgttgttattggtgaacgtgacaaaggcagagaagatcctgttctcttcgatgtctgcaggtcattccatccaggtcgtgcaggcatgtatacatgctgggaccagaaactcaatgctcgaccagggaattacggctcaaggattgattatgtgttgtgcagccttggtatgcggagctggttctccgactcaaacattcaagagggactgatggtatagacttctcgcatttatgatgtgaatcattgactgactgatttctagggatcagaccattgtcctgtgtatgctgttatcaaggagtctgtgaaccagcccaaaggcgaagtaaacgttcgggatattctcaacccgccaggaatgtttcactgtggcaggcgtcaacaggaatactcaaacgagtgcgcattgcccgcttcggggcgtttgctccccgaatttgacgttgataagcgcagaagcatcaaggacatgttctctcgaaaaccaaccagcgttccgtcgagggcggtagacctagccaacacaccggctaacattcccacgactcgagtcacagaatctacagacatgcacgcagccttcggatccactgactcggccaaaaagatccctgcgcctatcactgcgagaaatcaacttcctcagactgtttctcgcaaacgctcgcagcctctacctaccacatccgcgaaacgcaccaaatccgccgtatcgacgtcttctgggggctctgcggcaggccagaaaatgttaacaggcttcttcaagccaagggctgttatatctgaaaccacccagtcacctattcctttatcaggatcctcgacaccatcactcaatcccgaaccatcaggacagtcacaagagaaggggaaatatccagagatcaacctgcagtctccggggttacaagaagaaagcataagagaggaagctgatatttctaccgaagggccaacggccaggaagttcattgacgacacaataattgacccgattgtcagcaaggaggattggtcaaaactttttaccaagaaacctgttccaccatgcgatgggcaccaagagccatgtattagattgaccacgaagaaacccgggatgaatcgcggccgctccttttggatctgtcctcggccattgggacccagcggagaaaaggagaagggtacgcaatggcgttgtcccactttcatctgggccagtgactggaactcgccggttgcgacgcaagagcaataacatacatgtcccaggaaggcagatatcccttgatagccaacagagttactggaaattctacacccgagtatcgatattcatacgttgtaaatctagcgaggttgagccccggacaatccaaagattaggcgtacgcatgcataactcatgaagactgcttctgatgtcctgttgtcctagcaataatcaacgagtagggcactttgcatgctattcaaaaggatgtcatgtactcaaatgccagcatgtagcgggcaatccatagcgcaaacttcattgaagtctcccaggtctccagccattttccctagttccatttgtggactagtagctgccagtttctttgttctattgtcttctttgtttacctgggctttatttgtttaatttattgtatttatcgagttgatgtcccgattgggcatttttctttttttcgatttaatttcgttgtttgattatttattattttattattattttattattttaattagttaatcatttaattaattattatttcatgagtcacttcgtttgcccgttgccatgggaattcgagtcacgatacatttgagtcggaacgtcgacaactgactcactcccatattactcatagtttaaatcattatttcacaatgaccgagattatgcaattagaaacagacttcgtagttcaaagctatgtattttgtgcaaagtttggtatgttttttaaagttacatgtggcagcgggatacagcgggagctagtccccggatctgcagtggcacgcgccatatgcacatcaaccgtagcacagacagagctagtatagatcgaactacatagtatatcttcatgaactattaggatatactattcattgtaattattaggtagagcagcatatcaaacacgtaatgtacggttacaatccgaatggacagtccaagcatctaaatagacaaaatagtatacgacctgtttgtcgcactagtacttgatggcaaggtcacttgtagcatagtcatatccctccagaattgactttctttgttctactgctactatgcctaatggggaagtcttctctgaggatgagaccttgtgattggtgtcgctgggcaaacaaagaaacacgtctctcaccccgccaaacaaagaaaccacccaactcggcacctaccttgttctgcgctcccagcccctccgggactatatttgtttacctcgcgccttgtttcttcttcttcctcttccctctcctctctccatcccgttctctttttcttgcacttcacatccaaattttctatcttactacatttcattacaataactcattgtatctatcttttcagttaatcttgttcatcatggcgaataccctctttgagctggttggtgaggacgacgacatgtctcctcgccgtactatggagctcctttgggcagatgccgtcgcccatcttcctcagactgatggtgaagtgttcctgccgcgcaacgttgttgatgacgtgcttgacatggatcttctcatggacatggcaacccgccttgcgtaagtcttgaccagtggctatttggaccatgttattaacgagccataataggagcatgctcaacaagaaagttgacattgttctcgatgaatccattgatgcttaccgcatgttccccaagcacatcgcagcggagaatgatgaagatgtgtgggttgaatcgcatggccttgagctcgatgatcaccgtcggatcagcaagtctatttacaatgctggcagctctgtgaagctccctgtccgtcctgccaaagttcctcgtccccccaactgtttcattctgtaccgccaggccaaccaccacttggtcaaggatgccaaccctggtgtctccaacaacgaaatttgtcagtctcctccaactgttcttgtcttgtttctagctaatgaatgaaccagctcgtatcctcggcgcacgttggaacaatgagagccccgagattcgggagcagttcactcgtctagctgatgatctgaagcgggagcacgctatcaagcaccccgactatcagtacgctcctcgtcgtccctccgagcgcaagcgtcgcaccccccgcgcccgtgccagctgtctgcctgtcgcccaggaagattccaactacgttgatgtcgatgaccagttgatgacaatcgatgacaagtttatgtctgagttgcacagcaacggttaccttttcggtccgaacggtgtcgagccagtgtccgcccctttcaccaacgaagaatgcttggaaatgagcaatgagctgctttcaggcaacgttcttgcttctctgccatacatccctatgttctaaatggcccttgtaccttgaccgggcgcgacaatgttgacaatcatgcaacaattgtctactttcacttcttggtgactctccggtcacgatgagattacaccgataaatctcagtcatcagactttcttttcggtttctactacgactcacaaaaaaacaaaagaaaaaaaaaaaaaaaaaaaaaaaaaaaaaaaaaaaaaaaaaaaaaaaacaaaaaaaaaaacgaaaacaaaaaaaaaaggtccctttgcatgtattttggctcatgacaagttttcaggaggagagtcgactgggtttctttcccacggggttttcctggtcgctctcctcctgccgagtgagcattgttctgtacctaacttgaaatcaattagtgattttctcaaacttctttctctcttgtagcacgtatattctcagatgaatatgtagaaacgcatctaggacacgatcgcaacctcttggtatcacaggtgctcagtgacatacttcgacaaccaaccattcccaaatcctatgcttaccaaaattacgaaccagacaccctcagtttctcactcagaatgccactgggcctatttcactttgatctcacagctcgactacacagcgacgcccagagcctcgagtctctgtctttgtgcatgaggtgacgtctcgatactctttgttcacagccgccgctaagtcggcgccacccgcggatcggcatgcactacatccatggttccaccagtcgggtatggaccgagggagacaacgcttggcatgccgcgtcgagcaagggacatccatgtccggccatgcgaccgtgcgaccgtgcgctctacaggggtatctatatctaccggcgctaggacatggacatggacgcaggggagtggatctacacatatacaacaaacgcactacaatgattcagggaactgggtaagttgcttgtattcgctatgggaaatcaaaacaagagactaactacgggattagggagaagagcccagaccgaaaaacgcaaagtgcgagacggacgaagcaaaactcctcaaaattgggatgtggaatatacacagacagccaagagcgaaagacagatgcgacggtttccctaatcttcctggtatgagatcttgcgcatttcgcccagacgctggcgggcgcgagcgagaccgttctcgagttggaggatttcgacctgttgggaggagacatattagcattgcatggatgggatataagggggaaggggacgtcacatacctgctgctccatctcgcggaccttgaactcgtgcgagctcaactttccataatcctctccgtcatcgccgtcgcgattcttctccttaatgatgtcctgcacttgtcgcacgagggcacggcaagcagcacccactgccttgctggcggtctccaggcggtcctgggtcttgctcatgaatgttgccttgacgcgactggctgcgacaagctgggcagtgctggctgcaacatcgttggaggcgacaataagttgctctggcgagttacggcccgagatcacaccgtccgcagtctcgatcaatgtgttggtcgaagaagccactgctttggcggcagagatcaagccctccgtccaacggttgttcttcttgtagaaggcagtgcgagacgagctaccacggccttcgcgaacaatctcttgctgggtctctgtagcggccttgatcagctccgagatcgcgttggtgacggcaatagcggcggcaaggatgacatcgttgatgcgcagctcgtaagtcgagaacccgtcacggggcttgttcttgagcttggccagacgctgggcagctgcgtcaatggcatcggcggccttgagcagctcctggtcgacaagatcacccaaatcaccactggtgctgatcttggtattcttgggagcgaacgattcaacaagcttcgacagcgcctgcaagtcacgctggacttcgaggttgttgttgatgacaacatcagtcttttgcagtggttccagaccttcgagacggaacgactgcaagctacggaagaaccgaacggtcgcttgagcagacttgcgtgcagcattaaccaggtgatcggagctcttgtcatcggtagcgaagcggatgaggcccttggtgttgctcaacacatccgagacagatccagagaagatggacactgtgcggataatctcggcatgaggactattggggccatcggcaacaaagttgttgaaagctgttgagaactcagtggcggaagctgacgccttttcaatctgcgaaaggacatatggaggagaggcattttggttaccggcctgcatggacgagtccaattcatacagagcatcatcgacacgctgcacaccagtctgcagcacggagtcgataatatcgttaatcttcgcgactgtaccgtgaagcacagtgtcaatctggctgtccagcgcatggtcgacatcgccttggctctatagttgactgtggtcagtatgcaggcattcaatatcatcaagatcatcactaaccagtctaagctcctccagttccataagagcctgttccataccagacttgtacacctcaatctcctcgtccttctcacgaagagacaggtcaagatcttcctggcggtcattgttgcgactggaatgttcgtccaatgcgcgcgttttaatctataaggtcagcataaatcacacatctcagcaagatggacagttactcactcggagggactcttccaaatcagccatctcccggttatacttggacagcaaagacgagatctcggttccctttgagcgttctgcattttcagcacgctcaagagccatacgaagctcacgcttgaccttctccaagtcatccttgttggttccggtcagacggtcacggtcgtgcagagcacgatcacgttcccgaatcatgtcagcaagctccaagttcttagtcttcagctcgcgctccagcttctctcgtcgctcgattgcttcttgtgcggaggctgccttgagcttgaggctctttgtggtctgcagaagatctaggtgctcttgtcgaagctgtgagtacagtttggccaatgcctcgtacttggatctccaggtgttcacctgctcttgcagggatcgaatctgatcgtccttcgaggcattctgcaagttcaggttcgaggtcaagtggttcatctgctcctcaacctctttgacacggcggtcatattgctgcagcatcagctggtcgcgctcatactgtgcacgggcgttgagattctcctgctccagctctgccagccgaccttgggtttgggtctggtactggtcgcggagaagctgttcctgtgccaatcgctgctgttccgcctgcaggcgctgctgctcctcgaaatcgttctgggcttgctgttgggcaaggagttgctggcgttgctggtcctcccactgttgctgcaagcgttgttgttccgcctcgtactcttcttgctggcgtttagcttcgtttgtccagaaatcattgatcggctccggctcagcagcgaccttcggtggaggcgagggctggtgttccacttctttcgtcggtcgtctgggaagagctgggcgatcgtcatcctcggaaagcaaatttggtggatcttgtggcaatttcgggatggtgatgaggcctgttaggtagcgcaggttggaacactcatagtagaaccgaacaaggcggtgatgctgggcatcatatcgacctcggagtggctcgagagcttcatcctctccggtggctacaggagacatcagtcagcggctatttaacgcagattcaaggaccaaaggccacatacttgtgtgcatggctcgcagcatgctggtgatgaacttgtagatgccataactctcctgcacaagtggcaccaatgccgagattcgacattcgttgttcgtgccggactggaagttcgagaagatgagcttttggaaggaatcaatttgatcttgcaaagacatcaaatcggtgatggtctcgtagctttgtgactgtcaacacgtttctccattgtcgcaaaaaccaggtatttacgtacccttcgttcggatcattgatcaatttcagactaatgtactcctcatattcaaacaagcctgcgactgtcagacccccgcacttgacagaactcatcgaccatggacaacataccgttgaattcggggtgattgcgatggaagttcagtttcgcctcgaggaagaagacatactctcgaatgagcggcgcatatcctatccataactgttattataccgtccgttgcatgcgtcgctactcctcgggcagagagcaattgcgcagtcgtcctgcgtggaatccatacctcgaacgccgtcgcctccgactcctcgcatcaaactatcaatccagttggtatgttgctgcgcctcacggataaccatggggtggccctcctggagaaccttgtgtattgtgatcagggccttgaacgtctggacctcgtcggcgaggacgggctgcctatgaagaacgaagccgtgtcagccatatcgagaacaatacccctgaccacgtctttcaggtattccaaaacttacactttcatgccagcccagaaagccgccgatgacttgtggtcccacgtatagacgatgcagcttcgcacatgtttccctacaggcgcggggggtggtcagttcgattcggacggggcaaagccgaggcggcatcaatcgtttcgatggagggaatggtaatattgtcagaacatacgtttgggagcggtttcctctgttggttgtcaaaatgtcagtcatcatgtcctgtcccccgtgtcggtctcatccccgattgactacttaccgatactggtggccttgcggatattgatggccaaatcggcctcggtcctgcgcaatcctttatcagacaaacactctcaaagtcccatgtcggtcttgcttaccgactcatcgtggccgttggggtgtgtgctcaggggggaggagggtgtatgaaggtcgggaaggtttgtcgcgttgacaagatcttgagcccggacagcgcacagacgctaagaataggttgcgctgaccggaataagcggatatttcgaatcgcaaagcaaaggcgaaaaagacacacgtgggagtccggacaatgacgttgatggggaacgggaaagttggcgcctgtcgggagtcttggcgacgcctaagccgatgcgggtttgggccgcggcttggattctaaggcttcatccctgacgaaagctgtctcggtctacgcctcacatacacactccaggctaggcagaaggaatacatgggctattcatcatggccgatctctacggtgtgcttggtctacttcgttcgaaacgacttaagatcggcatggatatatggaatatcggaggattagctacatacataaagaagccacataaaggacttgggatacactgtgcgagagagcgatcacatgcggggataaccaacccgatatggagactgctatccagcacagcaatatggccaagcagtcgaaaaaaaagtacaaagggcctcgccatccaattcgatggtcgtatgatctatctataccaagggtccttggtcctcggtccttcccctctttcgtgtctgggcgaaggcaacgagcattatggtgagggtgtttctactctttcagtagacgccagggtttcatgactgcctggagttgaagagggcacctgttcaacagagcacggcgattcaacagcaggcaactgtccttgctcctccaaccgtccttgcccttcatgattcacctcgagctgctcggcctttggtggtgtctcactctcaacaggagtcggggctattagactggagtctgactccgggtccccaggggccgggctatttggctcggactcttggggagcttccaccacgagaagttcgtcagtaccttggttagcacgcacttcagggggcattggtttcctgcgtggtaaagttgatggtgaggagtgttggtctcgttcaggcactgtgtgtgctgctacaggtttacgcttgggcaattttcctgagttcctcttcagggcatatttgtctgggcgcggcaatggtgttccaagtggtggatgaggatggccacgcccaatcggttgggtaagcgtgcctggaggagtccgcgacgattcttgaccgtgattttggtcacctttaccaaacacgctccaactccatttcttggcagcggcggtggcttgcccgagagtcatcggacccgaaggcttatcgtcggaagatgtaaaggttttggtgatagtttcaattgtgctgcgtcttggggccgtatcgctgacaagggacgtggtggaactaccccgagagtttctcgagctggggaagcccccgctctccatgcgagtagaagaaggtctttgaataaaactctcatgtggaaaacgaacactctcaatagaatctgcaatcgatgacccgcggctatggagcgcattttctggtatcataaggccacctgtaggtggcgaggtgcccggggtttggttcggggatgtaggtggggaccggcttgatatctctatcatggcgcttgttgcatgactcttttcttcgcctttgctctccgaaacaagcttgtcaaccttggcattgtccgctgtgactacgggatctgcagcgtgggaaaaagtctgtgaccgaatagctcgaggcagcggtgtgctgcccggtctctcaacgccagttgaacttgcagttgcagtggaatcgttcgattgcagatccgatagggaagatttcacgcctttgcgcagcttcttcttgaccgttccggactcagaaaggacaggcatgctcatcgtgcgatcgtccttgaccctgagggcttcaatgggattactgtcaacgctctttggggtcgagggagctacgccagattcatctggtatctctggtatctctacctgagcactcgactctggagtgtctcgctgccagacaccaccgcggaaagcctggccgagcgtattatggaagggaacgtcgtcccagaaaggcagaacgatgctctctgccactgcttcgcggatcttactctcgatcgtgcgaaggatgaggctgtatgtgatttgtttggagctgacaatgggttggatgtccatttccatcttcggcatcgtttcgaaagacatccagatgcgattgctaggtgggggcttgaagcgtaccaacaaatggccttcaagtttcttcaacacaacggcaaggacaatatcgacctctctggccttgaatcgagtgcctaagtcaatacgcaccgtcgccgagatctcgacccggaagtttcctgtgtattgcatatcggcttccacgcagcaattgccgtccacagtcaagtccttgagtcttgggttggtgataaatggagccccttcacccatatcaattctctgtaagccgatcttgctgataaagttaggtttgttggcgcgagagatcttcttgacgatcttgctccgcacgaaagcctcatactcaggtgtccggtacatcgctaaaaaccaccttccaaggaaagcattgatccaacgcgtctgcaactgctcttcggatgaatgcagacgctgaaccaaggtgacaatatgtttggtatcaaactcctggggcttgggcgggcgatcaggcgagtcccacagccggttttgattctgcagcatggcgatatagaaatcctccttctcagacaaattttcagagaagaggtaaaacggcggagtcggtcctcctagatccccaagcgagcccagtcgccgtgagaggcagatggcgtttcttttgagccacagctctccttctgggatatccccttctccgccatatatggtcacatcgtggtgagcaagcgaaatgacataccgcacctcgacctgattcacgtcatcataaagcatcaagtggccatgtctgagcacatatcatccatcgtcagcaattagcgcttaaatagcagcctatacatccagacaaagagatgcataccggagaacaatgtaaaagacatttcgcgcccgtttcgtggtctttccattcgccttcgccggatcgatgctgggtgcctgctttcgatcgaacagactccggtacatggtctgatacacgctaggactttcggccgcgacgacttctcccgcgggtgtcgttctctccgggggtttcccattgacaccaccgggtacatattcacgacagacggcaaagtatccggcagcgacatcggactcgtgcgtgcgatggaatttctccgccagctggtctgtgccggacatgagactaaagtcgtcatcggtgggttggcggaccggatcgggcgctttctcgcatggttgcggcggttgcggtgccggtgggagggtcagataggcgtagaggagaaataaggacaagactagtggaatgaaagtaattccaccgagggcgtaaacgaagaggaagctagcgagcgaacccatcgggaaccagtcgatcaatgcgggcggatcgaaagctccatagtttgggagagcgacctccaacagcttagaaagaacacggcaaacaggaagagaccggctccggaataaaacgagcgatgggggacaaagaattatcaggcacaagtgagtgagttgaagggagttggtagcttccaaagtcatgacgggatgacgaaggtcaactgtgttgagacatcggtattggtgttttgtatctgtattactagtaaagtacttgctttagtaaatgtaatgctgtatttatattgtatttttaatacctactataatcttacctgtagctccgcttgtaccccacctgaatcaaccagctgtcaggaacatgagaagaatcctggaaaccaacaacctcacctgttactgttttagtcaattccaattgtggatggggttaatttagcctaaaatgggtattaaagaccttagatcagcgaaatagtcgataattctcctcttcatgcagtgcaacagtgactttaagacccgccgatcagataatcctgcattctataactatagacatcacactagcagagtttagcattatggacaagatctcaacatattttgccagttcttttatttagggttcatgtatgtatccatccatgattaagaactagcgtatataacatccatggataatgcgagaagagaagaaaacgttcctattggtgaagatcatatatatatatacatccaaccatctaagacatctaagtgtacatagcatatagaaaacaaaataaccgaagaaacaacagaaattgggcaagctgaaagacaagtatgtgtacatgggagcgcaatctcctctacttcctgcgattcatggtcttttcgcacatctcaatcagaccggtcttggcatcactatctgggaagtcgctgatggcggcaatggccttgtcagcgtattcctgggccagggcacgggtctgctcaacaccgttgctacggtaaacgagctcacgagcctagtaaaaccgagtcgttagtatcattgcatcaagcaaggtcacccgcgattttgaacacccaccttctgcacatcaccctccttgccgaacttccgtccaaccaggggaccaagctccgggttgctcttccacgcaaacaagagtggcgcagtggccaatccaagctccaagtctgcaccaactggtttgcccatctccgcctcggtgaccgtgtaatccaacatatcatcaacaagctggaaagctagacccaggttacggccatatgcgtacgaagcctcgataacctccggagcactccgtcccagaaccgcagcggaacggcaggacttgctgatcagactggcggtcttcaggtaggtcttctggaggtagtaggcaagtgtctcgtcggtgtagacgggtttcgcttcgtcttgcgcggtgttcttcagttgcatgaactcgccctccaccagattagcaataacagtggccatgagttcggtgacctcaggatcgcgcagacgagccagtgctaccgaggcacgcccaagcaagaagtcaccggctagcacggccatcttatttccgaacgctaggtttgcagagctattggcgcggcgtgtaacggcattgtcgataacatcgtcgtgcaggagagacgctgtgtgaatcaactctgtgatctcggccagccgccgttgtgaaggtaggatgttgtcatctcccacgagatcatatttgctctcggcgttcggggccacgagcgggttcatttctgggttggcgtcttcgaggatagatggtgcactgaaggaggaatcgacggggctcggtttatccgtgtaggtatggtgcttgcgagggtccaaagctgttgcttgggacatgaggagaacaagcatgggccgcatgtgcttgccctcactatgagtgtagtacttggcgaccttatccagagctgggtgacccgatccaagtaattgtcggatgttcttggtgaggaatttgagctctttcccaaccattctcaacgggtcgacggagatacctggaggcgccttcggcatacccttgaagatggcctgggccgctgtcacggcggccccaaatggtgaggcatcccgccggcgtgtcgggtggtatttgcgagattgaagagcaatatgcacgaagcggaggtcatcgcggaggcattgggaacagacagttgctcgtgatgagaggatcagcccggtggccgatgcagttcgagctcccatgctcaatgcgagggctcttcaattataaacgagagattccaaattaaaccataggaaaccaatcccagggaacaatatcgatgtgaggtgtctgcggagtccaaggacgaacaatcttgcgggcgggaagatttcgagctctctcgggtcggcacggacccggtacctacgcagccaagtatgactcggtgacctgctattgacacttctctacttcaaaaagatacgattaaggtgatattaatagaggacagtatagtctacaagtcattgatcactcagttatggcatacgattctaataaaggcacaatgcaagaaataattccagtataatagacacagaaaactgcgccggccatcttggtccccttcgtaaacatccgaatgaagaaccagaacaaggaaaacaaattgcacaattaacacaagggttgaagaaggccgctacgaggtagatacccatgcatgggaccagtgcggtagacggggaagaaaaaatgctgtatcgattatggaacaaccacactcctctttaaatggcatcgaaatcaccaccggcatcttcatcgtccatgtctccctcctggatctctttggcaagctcgcgctcccgttcccgagcttcttgggcactcttgagctccaggcggtgctggttcatggggaaacgcatagcctagatcgagtccatgttagtagatattattttagggatgttcagtgagagacggaataacataccttaacactctcatcgtggagggccagacaggcgcggatacgctcgtggaacgcctcgccaggctctctggtggcatagatgtcacccacttccttactcttcatgaatccgtgctcgtgatcaagcgtagcctcgataacaccgtctcgaatagccttggccacaatgtactcggcagattcttcgctgtcgagtccaaggcgaaggcaaatatcccgcagcgagatacgagagtaagacagtgacatcatgcgaataccggtcttgatgacattctgccgaagacgcaagatcaaggtgtatgtgccatctttccggaaagtctcactgtaggtgttgacaatgttgaggaacccatccagatcagcaacactgactgcctgagaaagcaacagataagggtgcatggcccgttccagagccggttggcggaagactgcacggtcaggaatatcacccatcaatagctcgacaacgaccaacaacttgttagaggcctggtagaacccacgagccaccgggctagcaggcgacttacgcgtagccccaatcagatgactatgggcctctgtgtattgcagctgaatagcacggatgcggccgaggtagaacagataccgagcaatctgattgttagaagcagccacggggaatgggttgtgcgagatcagtagatctgcctgtgagatatgagacgtggacaggtagttgcgaagcagcaaggtcatcacagtagcctgtgtatcgacatctttccgaagcacagccgtgcgaagcgccgccaacaatggctggcggatagtggtaacagccgctgcaggagaaggaggaagcggagcgatttgctcgaagaagagagagtagtaaaagtacgcgcgggcggtgagagaatccagcgtacgacggttcaatgctcgcaggcgctcgatcaagtttgtcgagaactggactcccttctgaatctctcgttggtcgaacaggtatatctggacgagaatagcaagatatgcatccacctcggcaagggtctcctgagcgatgggattcttatccgagtcaacttccatatccgaactagctggagcattttcgaaagcattggtttggccaagagcttccaaaaggaacgaggcggtagagctagaagcggaataggtttccacaatgacttcggcgaggacctccggggtgaggtgtttccgcatcgacgatatcgatcgcagaacacggagggtaaatctggggtcgaaatgggcaacggctcgctcgagaagggtaaagttggatttgatgtctaaaagcatgccggacaaacagacatatagttagacatttggacttctttgagcaacaaggaaaactagacgaaccttgaatcgccttagttgtcgggtcgacctctggctcggtggtctcgacatcctccgcaccttccatcgtcacatcgtcctccttatccttgccagacgatttggaacccttggttgggggcactacaacagtcatcttctcgttacttttgcggtccttgctggtgctggatgaggatgtaggcgcacctgccgtatctcccatctcaacatcttcggatccattcacaccgttctcggttgacttcgatccgttcgtatgcgacttatcatcgtctcccatgttgccgtttgatgcgccttttgcgtctttcttggtcggagctgacttggccttgttggcggcggcgcgagtagtgggcgccttgtctttcgcacccgggctctgagagttcgagtttgccttttcaccgttagcggatgaagaggtgtcggatttattgtttgatcgcaaagaacgcctttcggccggcatctttctcaagctgttgagctcggctgggcagccaccaagctatggaaggagtagggggaagggcgagtgagcacgatgtgaagatagaaagcggaaaagcaattccaaaagagccaagctgctgatatcacgagtctcgatgaagaaaaacttgtgtggacagatggatgaagtggatgggtgatgtgatgtcaagagatgggatgaacgggcgcgagagaccagatgagtgcttagtcagtaggagcttaccgcagcctcactcggcgcttttgctgttgaagctgttacaaccagaatatattgaaagaaaattggcaacaatagaataagaacaatctgtaaatctaaactaaatcagcaccatcgtatttggtcaaatttagcttggctagatgcaattactgatacccaggcatattctgaatttaatgcctcaggcatatatgcagctttccgagaggtaaacggtgcggtgcagtgtagagcgttcaaccactcatccttcacgatctaaggctctcaaaacacccacaacatgtcattgctcaattctcacctagaacagattagactctcttccaatgctatcgccgatttgccgttagtgcctatgatctccctcaaccatgttgctttgactaacgcaagcaagcattcaggttccctcccccacgtattttcaccactgcactgctgggctctcacgatataacagcattgattcgtgataccgaagcccacgaacgagcactcttccaggttgacccgtctaccaaagcccatggaccacaaagacgcgccacacgacgcgggactatgttccccgctgagaccgaaagggagtcaatggcaagccgcatttattcagcgcgggacaagcgcaaccagtctgcagtggcaagggtactgggacatgatatgatggaggagatcaagcgatcagcgggcacctcgactagaggaccccgcggggaggtcaacattgaagtgcttcttcgaggcgccgagatcctgtgcaatgtttagtgagtgctatatacctgataacaagtattgcttgatctaaccagctcaaagccccgttgccggtgcacaggaaaaaattgccaaccttcgctatcggcatgagatgatcagtgagtccatagcgcagttagaaggccgggttgcaacgaatactgcagaactggatcatatgagacactcttatggagatgatgaagatgattttccccctgcaccggtggcacaaccagagattccagaggtcactgatgaggatattgaacgggagttggctgaaatccggggtttggagcagaggaagcgaaggctcgaagaacgggttacaggcatggatcgagatttgggtggtttgataggctgagcctttctttcgcgatggttatattcctgccttatggaagaccttctactgacctcttgtctgcctctctacccaccaaacaaggacatcatgctctctggacacctccggctggataccacaactctatctaaatgaggagctctccaggttgatgactcgtccctggtttacactgccctgaccattggagacaatagggtctgacaagttgttatacttagccagaatagccttctcagttctgcatgctgctcatactgagcctttgtcccgagtgaggcttacttttgggtcgcttctaagtttcaccgaaaatgcgcctgacacctgcgtcaaggtcctcaccacccacagcctctggtgcccgtcctatccatgccaagttccctatgggagattttcgtgatacatacagcttttcatgttttacgatagtcatgaatatcaaggtaaatccattattcacgatattattactcagcatcaactgggttatttacaacgtactatagcagaaaccacgtactacatactagtgaatttcctctgttatttcttccaaggcatgtcaaatatggctgtgagtattccgtatctccaaaaatcatagaacggcctacctggacaaaagcaagcgcaggcttaaccccgagttcatatagcgccattggcccgtttgggtgtatgattggagaggttgtgagcacagtgcaaacgttgcttatattaccgccgtgacaccaccgatgcccgtacctgttaccatgtatatagatatgtgaccagcggtcgctattaggcggctgccagctacacaatatcatcatctcttccctcagctatcaatgcaatgaccggtagcatgtcgtggtatatgaccaggcctattatcttcactctgcattgatcaaatccctagcggtcttgtggttcttatatatcttctctccattcactcagatatcatccgggcgggggggacgcagttcctaggacgcctgcgaccattgaacagcttcatgatctttatcttgctctcatttgcgattgtacttctaataccctgttgctgctagtgggtgtattggtctacatggatcatgcaaaggaaggaagcaggatacacgcgtaacaaggatagtcggccgcttgtgtagcctgtcatgtcttctagtggtctttttatttgtctttttatttgtctttttggatgtctttttggatgtctttttttcgggtatttctccccattctcgatcacttaacaggcttctcccagagccttgaatttttgtggaatttcagaaaagttcggggcatgcaagcctaaaatatggtcaataacgaaccaatgaccgcgatgttatttacttcttcgaaaaagcaatatggccaggcccagcccgacctagcccggcctaaccacgtggtttgttttgctttttgctttcatttggtatatgtacccccgatcagcaagaggagatgtaaacagaggcgcaagacaacaaagtgtgtgcgagcactggagttgcccatccagcaagcgctccgtggggtggaggatcagtcttagacagctgagacatccagtagcagttcttttatagggtcagagagaatagctgtttaacgtatataggttaattggccctaaagccctgaaccgtcaatcacgtagcatctacacaagaatgtgacaacattggacctggctgtcctcgacagcaatgaatcaactagatgattccaaaatggcatttttgagtatattaatggttggagttgtatactattttgaatgagcagactggtgtaaaggcggtttatcagaattcgctgtgattgtctatagatcagtgaccaggcacgtgataatggttcgtgctcaggcttactcctgaagttgaccatgcgatatacagcaatagtacatagactagttgatctaaagtcgaagaatatcacaggcaatcaaaaatagccaaattatcatactaaataataaagatatatgaatctgcgagattgtagtttgaacatctctgttataaaggacggatgccaagaccgggcccaacctcatccgccgtcagaagtcgtaatctgccaaatctgaggttgattgcattcgaacttgcctgctctaacatctgcgcgatagactacagccttgcttgatttctaggcaacggcgatcggctatatatattaacatagaccatttcgtgacgaccaccctgtctccaccattcaactcctgcccttgaatcactagcagagtaccagcatatcaactcggatatggatgggtctcagggccaagttggccagccaatgggtgtcccgcagcagccacagcactcaaatctcattcgaaccgatcaagtacagaagctaccgcacctcagtgaccagcagaaggcccagcatacccaactggtgcgcagcctctgggatatgttgaacacccgcgatccacagacccacgaataccaacaggcgcatacgaagctctcgcagctgtcacagaacttgatgaaaggaatgcgggttttccagcagaatcgacagcaggcaatgcagcatcagcaccagcaagcggtgcagggacagccaggacaacagccacagccagggacacagccggtacagcaagctacccagggagctgttcagggagcgcaggggccacagggacaaccagtccagcggacgcaatcgaacaatccacagacgattaatcagctcattccgcaaatccaagcccgggtcagcgcgctcaatttcttcctgcctccgaatgtgactcccgagcaggtgcagacatggatacctgaagcccggttgcgatatggtatcgctcttcagaaacaagaggttggacgagctcggatggctgatcttcgttcgtcatatgctcagcggcaggcccagggcaatatgagccaggaggaaatgcaagaattcaaaaaccgacagctggcagctgaaaagctgttccgagagggtagcgagttcttgaacaagttcaaggaacagcaggaaagctttaagcttcaatcgcagcaaaatccacagaatcaagccatgaatcaggcaggacaggggaatacgcctgctaatttgaaccaaaccccagtcgcgcctcccatgtcaacacaaaacgtaccaaatccccaggcaggagcggcagccaaccccatgcaatcaggacaaactcaagccccagctcctcacaccatcaactcagcggtcaacgcagcacgccaaactgcaatgtctccctctacctctcagcctggacagccaccttctgcgcaatctgctggaaacactccagtcccaatcagtgcaccgctgcctcaagtgcaacgtccacagccatcccagcaaggaactccaggaggacaagtcacattcagccaaaaccctcatcctgacggttccgcccccacgccaccagggcccccccaacaggtgaaccaaggcccacctcgtcctctctcgcaccaagctgctatctcacaagcagcgcaaacctacaccaaccccacccctcaacagcaaacaatgactcagcaagcccaggctaaccagcaggctcacccccagggttatctttcaaaccgcccaggcgaaacttccacccgtaacaccaacatggcaatccccaagaaccttcatgtctccacccccgagcccgtctcaatgccaggctcgcgcccctctctttctggcggtcccagccacggtgccatgggtatgatgggccagcccgcgatccaaaaacaccctggctacgtcctggaaggtgaaggccagcgcgtgctgagcaagaagatgctcgacatcctcgtgcgacaggtgaccggtggcggcgaaggagaaatgctgactccagatgcggaagaggtatgtttgtcccgtttctccctttcacaatgagagataaatatgaaagaaaagatcggaaatattaatggtttcacagttcatcctccaaatggccgacgacttcgtcgacgaagtcatcacccaggcctgccgtctcgccaaactgcgcccttcctcgaccctcgagctgcgcgatatccagctcgtccttgaacgcaactacaacatgcgtatctccggcttctcgaccgatgacctccgcaccgtcaagaagccccagcctacccagggctggactcagaagatgtccgctgtccaggctgccaaagtcactcaaggcaagaacgagtaagatgcagatggtctgccatctgtcttttctgattatgctgcacacaacgcttttctttacgttttttcttctcttggaggtcaaatagggtgttttttctttcttctttttctttccccatcttactattttacccttttatattgtctcttgagaatatggcgtacctggtgtatgggcaggtctttcttcgcttctttcatttggccgcattcatggttgggacggggtcttcttggtcttttagttaggtccatatatgctttctggccgcccagtctatgcagtgcttggataatgaattttctatcctggctttcctggcttttctagatttgtttcggtccgtgtgctgttagtcttgtgtatgtatgtgctggccttgggctctactctacgtctgtccactccaatatagagaagatataggcatattgaatcaagccttactgcgcactgtatctaggtagttaccctctgtacagtgttactatcaagtatttactttaccatttacgaatggatacaacgaacagaaaaaaaagtaagttcccacgctgaattctgctaagttgatcatcctcagcagttaagaagcacgaatatcgggagacaacatgtggtatagtggttagtacagggtatggagagagactcgatcagggaagaagcaaatcaaagagaaaagaagaagaagaagaagtgggatacacaagagaggtacaaaaaggaaaaaaagcgctcgatgaacggagtgaggaccggattctgggcccgatggtattctttggctgtgagggcgttctttgaaaacaaaagggaaatgagaaaggaaatgaaatggttggtggaaagattggatcatcgatgtgacgttggcggaaaatatgacaataacactcattggactggagatgagacctggttatcatatagagagtgtggcaacggtatgttcgatcaatgagggtggaacctgtacagttcatgcgtgacccgcggacagtacagggtcgtggtaagcaatgttaaaaagaattaaagcgttcgagacggcgaagaaaagggggaaagagtcggtgaggttgggccttcaggccttgagtttggggctttgtccaaatgttccgagtaatgcaggcaaaaataaacaggaaacagacgaagaggtggagatgagtcgctcaacagtcaagagaaattatacacatgtcactcgtgaacatcagtttcttgcggaaagtgtttgggggaagtatgaggatgggaagatgatatgcctcgcgcagacccatgctgaggaaacaaaataggtggttctatcaagagcaacaagggggatatctcgctgaatacaaaaaaaacaagacaaagtgacgaattaaggtatcatggggatgtcagtatgtcagtcgctagaaagagctaacgtcgggccgggttgggagtcggaaaattgcgccggtcaacttccttgcctttgccgggtgccgatggaccgctgcgagggatgggaggcaatgccttgtctgatgctggagggccgtgtcggctgtgtgagctgcgccctccgacactgctagcctcgccggcttcatccacaatgggaagagtcgaagtcgggccgggacccccggcatctgctgggtcccaaacagtggctaatgttctaggatgtgtgacggacacgtctttcgatgcctccttctccgctgcttgcattgttctttcgacagaagaggatctcgaacttggcttttcagttgattgctgaggtgcaccagatgcggaaccgcgtcgtcgttcggcttcttcctttgacatggtgattcccttgatgaaattaatgaagcgctctccgtagctctctggcgggattggagaaatctgtccccggtcatgcgagagtcctttgaaaaagttctcgaatttcttggtggtcccgtaatgagtcaagcaatcaataataccgaggtaatagatctcgtcaccgggttggccattctcatgagtggctcggaaacctccatcatccgcgtagaagacatgatatttccgttcatcgaggatttcttctggcatcttcgcagctgccttgtccaatggaacaggccgttcacgtttgataagcatgcgcagctcccgggccttgcgttcattctccaatttcgatggagtgcgcatcaggttgttgggagtcggagccgtatcctcttcgcgattacctcctggttggaagacctgaagcgtcttgtcacgcaatttctcttcattgcccctacctgcatcatgaatgcctaccagaagagaatagtccattatcttgagcctttgaagcaacacaacgtcgcgtttcaattgctcaaggaagaattctcgttttgccgggccacattctatgtgacggttgcgacgaacccagttgaggtccttcatagttgctctagggtttctttcgagatctgactcttgtagatcacggccaaccgtcgagcccttcaggtcgaatgtctggtggatatcccggtggggcgggaacaggttattcatcacgacgaagtgaatctttcggccgtatgccatcttgactcggtgcaatccgtagaattgtgagatgagagtgcttgggttgttctccacgtgccggtagtactcaggaagaatcttccggagaagcttgtgctcggaatggtgaatggtcttgataatgtacttgtagtcccgcgagaagtaaaagaaactcccgctcttgccaggggaacccagttccgacaaaatgtacttgcttgtgagagacataaggtagtcggcaggatcgaggcgaaacttggcacgaaggtgtcggaatacccaaggtgcgtagtctttgaacttgaagtcgtatttggcggagggaatcagttcgttgccggttctgttactgtcagtcatatccaaattgtcaacattacaaggggtacacacatgtcaaaggagaacttgtgcctggcattaaagtccgccggggtgagttcccggtccattttcgcgttgattctcgagaccgtaaagcggataccagtcaacatgttgtatgcggttacatagttgacgtggttctggtccaccttggtgcccacaatcacccggtcgtcgtcctcctcttcgcgacgtcgtcgcgaggctcgcttttgtttgatagcttcggcccatcgggctgcatcttcatccggcggtgtctcatccaaagtgatatcttgctgggtgctggttttcgttgcccgtcgaataagaccgactgacgcgcgtcggaagccggtcgtcggtgacattcggccagtgctatacgcagcatcatcattgcattctgcgctttctcgtcgaacactaggcgttcttggaacctgcaatgaatttcgctgtcgcatattagagttctgcgattctggcacgggagcgacatcgtgtgtagatgaggcgggtggggaggcatgacgcggttggctgggcttcgaatttggtgccaggcgatcagggtctggagaaaaacggccggtctcatcctgctgcgggatctgtaagagcgaggccgacggcgagatcgaagactcatcgtagggcggataactatctccattgaccataagtttcccctgaacaggtcggccatttgcagtgccattgggttgttgactagaaggggatgtggttgtggagatagctcccggtccagtgtccgaaggttttcggtccagcatggcggacggccggccgttctcgcggggatccctgacgggcccattgcctaccgactgcatgctgccgtccttggacaggggcgggtcgcgcgtgtacgagccgacactagagcgagggccattcagggagtatgtactaccgttcttcaggtcggtcaaaaggttcctgtcattctgatgagagtcgttattcgtgtcgtcgccgttgggccagttagtccacaggaacgtatttccgacgggggtcttatcatgcgactttcggactgattcgaacgagcgcggatgagtggcggtggccgtgactgtggcagtctgataggagacgtcgttggagaagacaggcatattgaaatttcagggaacagggtgacgtgagttctgcgtggaccggcaacccgaagtgacggcagtcgcccttattggcggagatccaggaaagttgtgaaccggacggagaaaggggaaacaaagaaagtatagagccaggtgcccagggcgaggatattcaaccgatcaacatcactcagtcaatgcaagggaaaggggagattaagggtaaatgaggtggtgaaatgggggaaatatgggggggtgggaaggggaggaggaagatggttgtctgggagaaaagaattacacgtacaaaatgtacgcggacctccacttcacatgttcctacattcaatgattctatatattagatgttatgctatattctagtacggaggagacatggccacttttattctgattctttatgtagagaatatgtgttctgttcgttgtataaggaaataccaaggtattaggcatgaaaactcagatgtttgatgagcgtacaacatcacgtagtttagcacatcatttccatatattttcctcctttatattactgactactagtgaactagtatcgctttcacatagttactccgtactgccagtttcattctcttcaactctcaaccagttgcatatgcaaggaggtcgtgttgtacaactctatagaatacagtctctagggagtaagttatcaagagatacagttacctatatgttatacatagtcacctataataagatatatcatctactataccattgccctgggccaatacccatataacatactccgtactccataccaatacacgtggagatgcagagtggcgaccaattatacgccaatgagcctatctcctgtccctgaccttgtaatttcttgggtttagggcagggattgagtagatgttattgttcttctgcatctttttctactgtagatgttatatactccctatatgtactcaaagaaaagcaattgttccaaaaatagggctcaataatgaaatcttccgcatctgcgccacaggggaaattctccacttcaaggccaaagatacaatgatacaatgatacaatgtggtaaggatcctctctgaccggcatccccgtcgccgagccccgacctgaacaaattgaacatccgagccgagagaagagtcatactgtacggagtagaaaggtgcgatattataggtgcattcgtgtgcgaaacagactgaactgctaatgtccatatcggagctatctataaagacatgtgctcttctccctcacctctacggagtaccaattatcccaaatttcacttttcctggcatatttcgtagcttcaacccatggtccttaacatcggtagcgacataaccattcagagattgctatcatgtaccttgcgggagtgttacattgatatgtgcatgttcctgtatgcgaatggcaaggtaggatcgcacgtcctaaatcgccactttgtcacatgacttctgtagcccgcaaaaacacggatttggtagtgaaaatccccgttatggaaatactataacaagtatatgactcccttgatttgaccatctgccaattctatcgtcaattgtagatgtataaatcatttctaatactattactattaaatagaatactcttatgattctattcacgataaggcctcgggccgtgatctggttagcccccaccgagtgtacccacaaaatcccaagatcacaccaaatagcgtaagattgaatcaaatgggaatgagttaattagatttcccttcgctagcacttcctatttggcaacgatgggctagtagaggccgaatctacgaactacgtggcgtacttggccatttccgtcttagttggatttatgggaacaaagaaaaagcagctccaccgcaacctcctacaacaccatccctatagttcatgattctggctcaatattgtggctttaattgtagaatattgcatcatccgggaaggtcctcgtttggcgtgagacctgatttgtctcgtcgtgcactatgttgaacctactcaaccttttcgcatagatatagatgggcaagaagtaaacctatcagaattggatgccgatctttctaaggttgttctcaaaaagaggggaaagacacagcacaatctcgcaggagctaaagtagtttttaccggggtagttggtgcaagcagccatatcaggcaagaagaggcatctttcgaggtcattatagttcaaacacggcaacgccgctaaatgcaagaatccgggcagagaacttggaaaaagtatttagttcttgtgttgacctgccagcaacagtgtcacaactgcccatccttccctcaagacttttatccacgtgtttattgcccactatcatgactatacaacaatctcccaaaaacaacacccgaaaggtgtggaaccatgagtttacctggacagataagcacttcacgcccgaagagctgctgccattgagacagcagaccgatgatcttgccgtcgatgctgtgaatcgactgcaggctattgctacaaagacgaagagcaaacaaagcaacacgggacattgttttggtcgatttgacatgtatagtgttctgaaagaacatcatgaagaagacagtgtgctgcaagaactctggcaagaagtaaacacagtccctgaatgggttgactggacacaaattgaacgcggacaagagtttatctatcgctatatgatccccaacattaccggacttgctctccagggattcctaggcggcaccgcagtgggtaatccttcctttgacatcgtctaacagattgctaacttcaaaagacaatcgcaggtggaacggaggtcatcgtcagaacggggggcttttccatccgtgtcctgcctagaagattcctcgaaagcttcctatggctattgcaagtgacaatggacctggagtctatcaaacccggtggagaaggacacacctcgaccgtacgcgtccgtctattgcacgctacagttcggaatcgaatagtgaagctcatggaccaagacccgacgtacttcgatgaagctaagtatggcgcgccggttaatatgagagacgcaattcatgcgacggctatcttctgctgtatgccgctcttccggcaactccctaagattggtatccagcctcgcccgcaggagacggaggatttcctagcgctgtttcgatacattgcctatatcatggcgactccgaacggcttctttgacggagctgaacaatcaaaggctactatggagagtgtcatgatgtgtgagcctgagccgacagagtcctctaaggctgttggagcgaatttcgtcgctgctatccaggattatcctggtgtcaatgtgtctaagtcaatgatcgaagttggatgccgtgtactgagcggcgacgaactggcagataagatgggattttcgcagcctgggatattttacagggcctctttcagaggatggtgccaacttcttgtggctgttaacgctcttcagcggttgtccccggcctttgatcaaatacttatgagggtgagttggttaaaaaaaaataatcgagacactaggaaaagaatgatgggttcaactaccaccagaatactaatggcttacagaaatcgaaagagttcgtgctcgtcaacgtgtttggggcgtcgattttgaaagaagggaacaaattcgagttcactcaccaaccacaactgaacaaattgaccaagaaagagactaagacggataccaatctctcctggttcaggccggtggagacaatcggatttgttatgttcctattcgaatgtcttgtttatgccctggcctttggcttgccgggatatgttctctatgcaaatggcatagtctctcgcacttttctacatgtccttggataatgtgcataaatgcttgtcaagttctttcgatgacgtgtgccacttcggtcacttctgctagaattacatggactttaccgtttcttaccgtttttatctaattatagaatgggctaaataaagtaccggtatccgatcgtaaaaaccaagtatattaagggcttgggactttagtatcaacaccatggtactcgcaaagtaattttgtgtacggaatatacgctgtactattttgcattctcaacatagattggactatctcaagggcagtagaacgccaagaagccaggataaaaataactctgacactgacacttgacacgggacagaatgtggagagatctaccgtttgtttacaactttgacataggtagcataactctacaatttcagctcaaaaatccaaaaccaatatgaattccagtaacgatggaattaatcacaataccaaggtaataagaagaccgcagttccccattgcaaaccccaccgcaggacgccatccactggactttggaaagaagcaaagcccataacaaagatatccaaaaaaaaaactatagagaaacaaaaccgaggaaaccatcagagccactgcgatcactgagtccaaagaaagaaattacaagagaagaacaaagaaaatcagtaccaggtactctccctggaaatgcgcacgtgaaaatatagggagagctcaacctggtgaaaaacaaaggcatcaaagcctctacttcttggtggtccgcttcttgggagctgcccgggttgtcgttgttggctgaggggcagtagtcttggtgatacgtccagacttggtctttccaagaatcttgggctgctcaacaatagcaggagcctggaatgtttgttagtgacagagggagatggactaaacatctggagtcaacttacgttatcggtagccttgcgggccttgccagagttagccttgggcttggtggcggtggtcttcttgaccgctgccttcttgggagcggcagtctttgcgacagtagccttcttgggggcaaccttgggagccgcggcctttttacaataagccgggaacatagaatacttccttgatgagagcttaccttgacaatgggcttagcaggggccttggtgacaggcttcgccacaggcttaggagcggccttgacaggaacatccttcttcgcaagcttcagggggccagatgggcctagagtgcgacgcgtcagttaaatggtcgagacatgtgcaacgaaatgcagaaattggtcaagtcgcgcaaaagagaatataacccatgcgcagggtaaatattaacttacccttgggctgagtgaactcatccttctcaacaccagccttgatagccttgttgaactgagagtcaaagacactctgagaagtgacgttgatcttgttgttcgactgaacgtacttcttaatagcctggcgactaaaacaggggaaattcagtcagtggctgctttctgaaatagatggcgcgagaatccagaccgatccccgaggcatcggtgacggaaggaaaacaccagaaaacatacctgctaccatttcgttctttcaactgtacacacaaagggcccgagtcagcaatgaaatccgattaaaactacgaaattgatttggttgtgccatgcccaaaggcaaagacgtgtcacggtcgggcgcgcgacccgaatcacaacaaccagcgcgccggcagagatcaactcacgttaataatggcatccttgatcatatctgtatcacccgaatcagcagatgctcgcgacgaaattcatgtgcatatcgattttacgcgatgtggtgggcgttcaggattagtagagacataccgcggtaggaagtgtgcagagcaggcgccaccttcttggacgcgctggtaaccttcttgggaggcatgattgatgattgatttgagaagaggatgggatgaagaaggtccggttatcaaaagatgagaagacttgagaaaaaaaaaggtggtgagagtgaaagcagaagaagaaaaaaagagcagaagggaagggaaggccgcggggcatccgcgatttataggcgaccggtgttgacaagatcatcggagagatttagaaaaaagcactttctttgggtttttccttcttgcaagttgtcgtccagctggtttttgtttttaattaacgtggtgtttctcttctgtgtgtccttgcgagttgtctctttgcgtgttccaaccttggaatggctgatatggctgatgtctacaggttctctctctttcgtatcagatactgcaatatcatacattgttatatttctttcgatctctattggaatacctaaagactttgtgatattataacgcgacaataatcatataaactggtgaactggtgcttctacgcgtcccctttcccctcgatagaaatcgcgcatactctattttggaggctttgagggcgagccatatctctcagagtagggcagagggagatcatctgttatgcacattccaatgctgtctggggtaacccttccctcttgttgagccgaatctgaacccttgaaacctagaatctagtcgcgaggaacacagttcggagatatagtatgaccttttatatctacaacgttccttaacgcatcaaagcctccttgcttggaggggaacctggggaggctgcattgcctcgtgctaaaaggtcacgttgtaggtcaaagacctgtgacttgtgaccatggtaccgccccttaatgatgtcgagactcgccttatacgaacaaccttctatcttgaatcaagtagtgggtgggaaataggagatggtacttcagatctttttgatcatgtagacaataatgggaaagatagtagctaaataagcagacactccatgtaatacggataactatatatattatcgaaactaacaagacaaattatatttttctagcattccatcataccggtagtatctagataccataaaccataacaaacacaaggtttatgaagcccgaacttcgatcagaacccgggtggcacacgataactccattgtatatatccaagagaggggaaaggctctcacctcagctgcaacgccactacttaatcacatcgggatcaccaggccagccaatcaaagacgcggaatagccccaattccaccattccccgctgatacgcgcccctaaagttaccgagaagaaacaagaaaggtggccgggggcctgggatcgacccgccacagatgtatgagggaacgagcgcgtttgccccaacgtcgaaccaacacagacggatagtaatgaggatctattctcattggactatattcccaatttcctatcgcatgactctaattattggcccatcggcgtagctgggtgacggggatcaccgtatctgcatccgcaaccggcgcgtcgaatcaagggctcagctggcgtaaacgctgatcctgcaccacttaaactctttttgcatcttttgatggtggagattccttatggtacctggtgtcagtatatatcttctgcattcgaagtatttgctgctcatttcgtgaagatcagtcgtagttggtgttgtgaggcctcgagtaatctcgctaatcgggcccgatctatacagcctggacgcgaacactgattatggacacccttgagatagctacaccagagcatctggaaaggagttttgatatgctgaagtgttgagaacagatggaagataatgagtatacagattttggactcttttcccaactgtagcccccaggatcagacggaattcccatgtctgctctacttgatcttgtttgatcctgacgtccaacggaccgaaaatggttactggaacaagagagaagcatcggagtacatatttcttaagttatatttcaaatcagaccaccttttgctacgatacaaggaacttcatgccttgacccgatcccgaggcgaaacggtcattttccgcaataaaaaaaatccttatgcataaacattagaaacaataaaacatataacgccacgccagtccagctcatgttagatcaggaaaattttgtatcataagtacggaaaaatcatctctcgtcatcaagagactaggccgctccacgcggcttcgacttggcatccttcttagccttggcatcttccttctttttcttcttttgctgctgcagcttctcgtcgtgcttgcgcttgagagatgccttttcgtcctcagtgcgagcgacgggcttgaagaatccctccagtcgcgactgctgagctgtcttgagatgcttcgacagacgggcggcaccattgcgcacacggtcctcgttgaagcccttgtccccaaccaggtactcaatcaggccttcaacgttgggagcttcccacttgaaatcgcattcggggtcatcggcaggccggacgtcagggtggacaaaaagttctcgcgcatcttcgtacggccagtcctcaggaacgacaaatttcttcttcgggtcgttcttaatgaactccaggactttctctagagacttgtgctccttgatcaggctgagagcagtggtggctcccactttgggaataggctctaggtagtcacagcctagaagaatgcagagatcgatgaactagacgtagttagcaattgtgactgcgcgtatcataaccagaatacgtacctgtgggcggtccatatcgagaccctcaagcgctcgatccaagtggatctcctggataggttccttgcgctgctcactgaatgtcaagtgccgcaggagaatcggcgactcaaaacacaatgtatccatatcctctgatgcagcggcgtacaccttacctgcacgagccaggaccgcacattgtgcttcggcctccgtcggcgcgttaatataaggaattcccatcagcccaaggagctttttgcactccgcattgtgttcacgagtaacgcggacagtccgccgtgagaacttttcgatatcttccgcagttccagtttccttggcctcttcatgggcctcggtcgcctcggccttgcgtgcaacacgcttcgccaattcgccagacttgagcttcggcggcgctccatcgaagacgtaaagaggtttgatcccgttgtccaccatccgcagggtacggtagaacatgcccattaggtgggatgtggtctcgccagactcactcatgagctgttgaccctccgagcgcacggcgatcaggaaactgtagatgctcatcgacctattctgggttagattcttgagctaccgggacgatgatcgaatgacgtacgcatcctaattcggagagttcatgtcagcaactgaaaatatgtggtaggttatacatttcatacaattgcgaccttgcggccgaagtggttcttgatctcgcccgtcttgatcgcatcgggggcattctcggcgattacctggtacaggtctggtatttatttagcaagaggtatggataatcgggaatagaatacttacgtttaatacccatcttgaacgtgagcttaggttgtctcaagttgaattcttgtgtctgtgtagaagttgagcttgacctgtcgcagtacgcgaacgcgctgggccggaagcgcgacaccatttaaacccaattaggcatagtgtcatgcaatatcacgtgaccggtcaaatccggacccactcctgtcttatcttggcctgaatatgcatgtctgcctcaggcggccaaccggcaatgagtaattattcgggccagaaccggccggtgtgaagctgctccgaccccgcctttctgtattccccggaatgcgccagaaggaggatgagtccaacctccacaccaatatgaagcggaatcgcattcaattcgaggccaatggcgaggcctcgtctgcttctccccctcagggtgtcttcaccccggaggaccgccctcaccatgtgccgaagatatctagacggatacgggcatgcactgagtgtaagcgacacaaggtgcgatgtgatatgaaggcaaccgactcggtatgctcgcgctgtcagcgcatgggactggagtgtatcgtgaacaaaagtcttcaaacattgctggaggacgaagctgagtaagtgccttatcttgggtgtttacatcggtgacatatactgattgcgccgggttatgataggtggaaatcaatgatcgaatcggcaatgacggacctgctcagaaaatcgcagctaccggagctatcatactaccaagcaggcggtggtacagagacaccttcgaacaagagaggccggaaagactccaccgtctcgactgatgatactggacttgggcaacataaaagggccgagccagtcggtaatacagtaaaaaatggcgcagctggaaggtcaaattatggcttctcccaacaacagccacgatattctttagaccgcgaggaaactggcgcaacttctctggtcacagccccgatgggcagtctgtacgaggtgacacagctcagtgaaaaccgcgagagctcgcccggacaaaagcttgccccggaccaagtattggtcactgatctcatctcgcgcggagtggttgatatccaggaagcggaggagttgttttatcacttcgaccaggtactcaaccgttacctatgggatggagccttgctagcacataaagacttgacgtctgtccgacgatcttcatcaatgctgtctgctgccattttggccgtcaccgcgcttcacatgccgaccaaggaacgcacgtttgatacatgctacaccgagtttgcaaaattggcatcagagtctatgctggaccaccatcataccctagatgatatccgcgcactatgcattggagcattctggcttgctgatgttagttggaagctctctggctatgccgttcgtattgcaaccgagcgcaacctgcatcagttctttcgcaaagccacacaagggtcgccagaacacatggaacaggcgaggctatggtatctactctatgtgagtaatatttgacccaaagtgttgttgttgttgctcatagttttcagaccttggaacaccacttttctattgcatacggccgaccaccgatgatccatgaagatgtcagtatcattcagcacaatgtctttacacaaaatccgtccatttcacaaggtgatcttcgacttcatagccaggtcgacctgttcatcattctcacccgaatgtattttgcattcggtccagatgtcgacctagaagttccagagagcgatttccccaaaattgatcaatacgatgttgatataggggactggaagtcagcatggcttcctagactcggtaagtctgacttcctgagacacagctacattgtctaatatgttactacagcgggaagtcgctacgtcggtgcatatccatacaaggccgtgtatatgcactatcatttctctcggctgcagcttaactcacttgctctgcgcacataccactcgtcaacctcctcaggacaaatgtcttatgaacgcaggaagcgtgctaacatcgctgttgaatcagccattgcgactctccaggtttgtctggaagagcgagacatccagctggcgctcgttggcgtcccactatatctccacagcatgatcacatttgccgcagtctttctgctaaagatcacagccaagatttgctcgaatggaaccattcccgggagccagggcaaacggacctcaatcgcctcggcagggctacacattgacgtgagctacgtacgtgttctcgtcggacggatcgtcgagctcatggtctcctgtagtcagcgagcgagcgagcgccacctgagtcaccacatcgcccggggtctccgcaagatgctgactgggcttgaggaatgggagaagcgcactgctggtacccataccatggggttagctgcacatgaatcccattctcttttcaagccggtggtaattcctggagcgcagatgctgggtgagcgtgacactattctgaatcacccgcctccattgcttggtgtggcaccgctgtccgctgaacgcagcaatgggtttgaacaccctctgaccccagggaagcacgagcccggtctatcggaaggctcggttgaccctatgatggcggatctttggggatttgacgaggattatttccccacgggagtgtttgacttccttcagagccagatgccagcgtgatccggacttggaatgttttccctgggctgttctctttatacatagtaataaacggcctatgattgacgatcacggttgttgcaggagaatatatgaatattagaaacatacattagagtgaactactaattaagtcggactatatctccatacttccttaataaatggcattgcccagtacaacatatagttaagaatggatgggaattcgacattggacgccacttgatccccgtccgttcttttccttattttgattcctttccaattatcaccatgcgactaagatacatatgctctacggactccggagtataacataccttgtctctcggtgcttggcatagagccacccggtagaccgaaaaagtccgagtcggttgaacatgcggaaccaaacagcccatttctcggggattctgtcgaatcacattggactagattaatacaaaagccgacttactgttgatcttgtaattccgttattcctggtgtattgcactcggtgattccatttaccccaaacttgcaagactgccgaggtatccgcatatttgatccagtttccgcaacaattgacaactttattctctctccactctgttcaattgtccattctctgttttagctatgatgaaccgatctcttcttcgcgcagctgcgcgctcaatccaggctggtcctacctccgtggcaggccgccggtacgcctcctcggccgtcttcaattgggaggatcccctcgtcgcagcggacctgctcacagaggaggaattggcaattcaggagacagcacgccaatactgccaggataagcttgcaccccgcgttttgggtatgtttaattcgcttgcttctgtgaaatgatggactgacgtcagtgacctccttgcagaggcctaccgcaacgagaactacgaccgccgaatcctagaagagatgggcgacctcggcctcctcggagcttcaattgaaggatatggatgcgcgggtgtcagcaccgtggcatcgggcctcatcaccaaggaagttgagcgcgtggactctggataccgatcaggcatgtcagttcagagctcgctagccatgaccggtatctacgagtttggcacagaagagcaaaagcagcgcttcctgcctagcctcgctaagggcacaatcgccggctgcttcggtctgacagagcccaaccacggctccgaccctgggtccatggaaaccgtggcgcgggagcaccccacgcagaagggcgtgtacctgctcaccggcagcaagacatggatcacgaactcgcccatcgctgacatcgcgctcgtatgggctaagcttgagtctactgggaagatccgtggatttatcgtggagcgtaagcgtgcgacgcccgggtcgtacgagacccccgctatcaagaataagactgccctgcgtgcttccgtcactggtatgatccatatggataactgccccgtaccggcggagaatatgctgcccgatgtcgaaggtctcaagggtccctttacatgcttgaacagtgcccgtttgggaattgcctttggtgccatgggtgccctggaggattgtcttgcccgtgcgcgcgagtacagtctggagcgcaagcagttcaagggcaacccgcttgccaagtaccagcttattcagatgaagttggctaacgctgctacggatgctgcttacggaaccctggctgcgatccaggtggctcgtcttaaggatgctggcaaggctacgcctgagatgatctcgatgatcaagcgtcagaactgtgaccgtgctctggctaattccagaacgtaggtttctctgtcttttatttttgggttgctttactgacatagtattagtctgcaggaaatcttcggtggcaacgctgccagcgacgagtatcatatcggccgccatgtggccaacctgtttgtggtgcagacctacgaaggtcagagcgatatccatggtaagtcaaccctgcctgattgtgttgggctgaggctaatgcatgtttcaagctttgatcctgggccgtgccattacaggcaagcaggcctttgtctgaacataaaaagaacatatttgtatatagactatatcccaatcgaatgtttcaaagaggtacaccgcagttctaggagtagccagtaagacatcaggagctccccctgagaagtatagggtcacgctatcaaaggacagttccttcctctttgggacaagcgggaaattgcggacgcctcacccgcacgtgacatcatcgaggggcagtgtatcagtatcatgcggtgtaatacgggtttcaatacatacagaggtatattgaatgggagaggattggatatgaagtgtatgacatgactaaaattggacgtggccatgttagaaatgtgtatatgtgtctacccggttaggcactgctctctatgtatcaggctggtcacttgaaatatccacctgtctgctaatgctgtcttgtatacgggatactccatatatgccttttcctgaccccaaattcgatcagccctaggcattgcctttcatgaagcaatactcaatcataatatacacacatatacccttctatctacttctgcctcattctctaatacctcaatgaggtaacccagctgagtcatcatgtgtcaagtgggcgcccggtaattacggtattgggtcgtacaataccgacagaatcgattccgcccatgggggcacttttccccctcttcctcttgagactcccaattatcttcttccctcttctttttccacacaaaggcgtaatcgtaagatctgctttatctttcactctgagcatcaactgaccacccatcacccagcttcttttccactttcttcacctttctctctttgctcgtcatggctctcaagcgtattaacaaggaactcgctgacctcggccggtaagcctatcctgatgctatctctgctatcttcttgtggttcatgaatctaactctcctctagggatccaccctcgtcctgctccgctggtcccgttggagatgatctggtatgaactctgaaccctcgttttcttgctcggcgccatctggcggggcacaaccccggctttgacaatcttgatatcaatgagaagatcgtggatggctgacttgtcatttttctcttacagttccactggcaagcaaccatcatgggtcctgtaagttgttctcgtctgtgctttggaggaccttggggccatttggccctttgcgagctccggagattcatcaccagatccatgatactaatagatcatatagggtgactccccatactctggcggtgtcttcttccttgccatccacttccctaccgactaccccttcaagccccccaaggtcaacttcaccacccgcatctaccaccccaacatcaactcgaacggcagcatctgcctggacatcctgagagaccaatggagtcctgctctcaccatttctaaaggtgagcaagaccttctcctttcattctacacagtttctaacgacccatagtgttgctctccatttgttccatgctcacagaccccaacccggacgatcctctggtgcccgaaatcgcgcacgtctacaagaccgaccgaccccgttacgaggcgacggctcgcgagtggacgcggaagtacgctatttgagtgaaacgacaaatctgattactccttcgcttcttatgtcttctctatctatccctcaataaccctccttgcgacccctatttcgctcgaccactttttatcggtgtcatttcaacgtcgctctgcatctttccgctttcttgcccccgctctagattcagaatccgcgaaagcctggcgtacctgtggtcgtagaaacgttttcagttttcccaaactcagtgtgttaatttcaaatgcacctgttcttgcgcgcgtttgcttcctacttcggtgccgaaaactccatttgcgccgggtttgaccttgtttgttgggctgagtttctgggactttccatatccaacgatccttatgacaaattctcatgcattcatggcatccatttctctttttttcaaacgctccatgcgtctaggattgaattatggacactgccgagtttccgcaagttcttcttttgcttgtactagcgatgcttcagactcggtgggtaatgcttggggagtttcagagagtagttcgagatcgcccttgtcttgggtcttgcgcttaggggttataaggggctttatcttttcctatccaaatagcacaatctaggcagggcctatcttgtgtatgagcttttgatagtgtagactgtaatttgtacgtcgtataactacaacttcaaacactgattgattcacttgatgcattccaattgcccaactccaaatccaaactccctatatgtgtatgtatgtatatgtatctgtgtaaatgcaaataaaaaagaaatgaagagtagaaatccatcaaatcaactgtcgtaaaccatgcgactgaaccaaacccagactcaaaacaagtccaagcaagtccaggacgaaaagaaagaaagaagtaaaatgcaaaataaatcaaacctagccccctaaaaggaaaaaggaaccaggcagacctattcaaaacatgcatcatcaaaccgcctgacttccccgtcgactcccagcccgcgacccctccttcgcagtgcgctgactagcccgagaaacctgactcaccgaatccgccgggctgacacgatcatcaaccctagagctcttcgagctcccagaccgatgcgagcggtggcgatgcggatgcaacccaacctggctaatcgagtcatccggcgagacttgcgaggcaacgtccagatccaccacgctctcaggaagcgggacgttccgcgcagagaaatgcgacttcccgccgtccctgctgtggatactcgggctggagtagaatgttgcattcgagccggtggggagggggatgttgcgcgctgagcgcgaggatgaggcaacgctagcgttgtccttgccggcgtgcgagtgcgtgctgtgctggctcttgtgcgagcgtgacgtcgtgctctgcggcgctttgatcgttgaggagctgtgcacgctgcttggcgcgcgcatcttctcttcgtggtagctgctgatgaaggtggacggggcgcacgcgtagcgtttctgtgaggcgttgctggcgggtgggtactcgattgcccggagcgggatgtcttctgggatgctgtagatgctgccttctgaggcacggcgagggttttccatgtactcggagccgtcgtagattgtgctggcgcgagggttcttggaggttacgctgcgcgttagggttgagcgtgggtttgaggcggtggtgtaggcgctgcggggtggtgcgggtgcttcgatggcgcggaattgggattgttggtcgtcgttgccgaagaaggactgtgcggcggctttgagttgggggaagctgtttgcgaactgcattggttcgtgttcttgggccgttgactgtgagtcgcctttgaccattgcgtaggcgatcgctgctcctgcggcggcgccgatgagcgtgccgacgatggtcttggctgccatgctgccgtcgtcgctctggggcggtgcgtgcgactgcatggtatatgacggtggtggcgggccttggaattggcgcgagaccatagatggtgccgaccgctcatagactgagggtgctttggaacctgcgcgagacttggtgtctgatcgggcttcggatcttgcttcggatcgggcttcagatctcgcctcagatcttgccacggatctagtgtcggaccttgccacggatctttcggacatagcctcagaccttgggggtgcgatgctctccgccttggcagtgctagctctactgctcgcccttgagaccacagagcggctagaaccctccagcagagccattgtcggcccgctggcggcggatatcaccgaggcagcgccaggccggtagacggcttcaacgctgttgccatcgaagtcgatgacggctgcactgaagtacccagattgcgaatctcgcattttgggttcgccgtggatcttcgcgccggctttaagggcgcttatgaagaacgagccgacagcgtctttcgacggggctgggaaggcgacatggactgcgccaggaggacatctttggtttaagttagctttgtcgagagactgggtttctatatcactcacccaggcttagtctcggtcatccagaaatcagcaggttccccctgcttctgaccgaaccctatatagtcgtcatgtcgaccgatgaattggtatcccaatggctgtaaacatgataaatagaaagaggtagaggtcgggaggtgagcgacagtcagggtgatatgcgagacaggcattgcgaaggttgaagtgagggtgcctggatactagcacgtagagtaaaagagaacagggatatgaaaaaaacgaaggtggctggaaggaaaagagaggttgaatggagtcggtaaagatatatacggtgaaggaatccaagtctatagccagaagtatgacgccgggaaacgaggccacatgaacagttcccccaagagccagtcagaataaatgccgtgtgactctaaaccaaaaacagagccgaaactaggctagcagcttccaaaatcctgcccaagctggcgaaaaggtctcacccagaacaccgcatgtctcccctcgatagtaggtgggcactgaggaacgtgtgaactctgtatggagtcaggccagtggggtccccgagacgattggccgaacgatcaagtcaatgctttggacccgatctgcacgggatatttgaaacggtccaggacgaggcgtgtccagggcccaagttgcattccgtgctccatacttggtgagcacagaaataataatgccagttcgtactcccagtagcacggtactcagaccggaaattgttcctgttcctgtgcttggccgctttcggatacctcggggcccaaccttgggaaagtgaaacgctctatggctggaagggtgcagatgggtccctgccaggtcatcgcggggagccaatgtggattcctgttggcggatggggcgtctgttcaggatgccctgagcgaggtgcatgagcctatcgacgttaagtggacattttgcttacttgttcctctcgtgtagcaaatggcggactttggagtggaggaagaggagatttgccaggtgggcttgggtagatgtgctgaccgctacggggttgagtcatatgttgtacagtagcagagcaactaactatggagtatgttgtacaccgtaagtcgatatttggggataattatgagaatatgatctagaatgctacgatctctacatctccaaatataaaatgggcagaagtgcatcgcctatcgccaccctcggtccgattcgcgtattcaaagtgaggcgaggctagttgcatgccacgtcaatcggaattattgggagaaagagaggtgaaagtaaaaagcaaagggaaaaagtaaagttaaaagtaaaaaataaaaaagccataattgtattgaacacagaagttgaagatatgtgtctcaggaatccccaaacgggccctgacctatgtgctgttcactttttctggtctacacatcgcagcgaggttgaagctggatggaggcaagacgaatcaaggactggcgaaaaggaaccaaatgccatccgacccgtaacggagggggaaaaaagacccaggtgctctctaaacacccgtacccttgggatgaaaatcccgatgcttggtagtcccagtatgttgtatgcagtatttccagttcccccaaacaaaacagagagatatagaaaggcagagagagctgggcttggagaacagccaaaatatggaacaagaacagatatatgcagagatatgatcggtagcttcgttccgggcagctcaatccccgcctgtaaaaaaaaggtgcctagcaaatgtgccgtcagtacagacgaccatgacgcgcgctcgttgggcgcgatcctttcttttctttttccagttgagtgtctcagagaatatcccagacttcttcggcagcgtggcagaacttgctgcaggccacactggcactaagactgtaattactgatactgatggtttcatccttaaaagagtccgcaaagtcgtcgtttcccttggccatggcaccgacgaagatggcgacactctcattggggttcagcgtctctagatagtccttggtgcggaccacgggcgcctcgaaactcatggtcaccttgcggcagttcgggggaagatggtcggtgatcgggttcttgataaccttgagaagcttttcttgcgagttggtcgaacggatggagagtcggtggagcagttgcaccattagaccggcgaaccgcttgaatgttctcgggatacggacggaagggttgacttcgatcaagacgcccttggcggtgtggatgaaaatttggagccgaccggccttgttcacgggggagtcgagaagagtgagcagacactacgctggattagtggggattctttgaccttgctattgccactggcgatgttgaatcgtacctggtgggtaatatccggtcgggcttcactgatatcgcggttcattttgcgcatgataccgatgtgctcatcgctgttcaacagagagaacttctcatccttggttcctgaacgtccactggagacagccttgtaggtttccagactggcattggagaggaccacaatcaagcgttgggtgttcttgtcatggggaggaattggcatatgctgttcggcgacgagctggggaagctctggaggagggcatgattgggtccctggcgatgaaaagtcagacatggtgaagttgagaattgcaatttgggcgcggggaggggtaagggaaggggggggaaaggtgacagatgtggctgggatgtgatccgaggggatcaatgcccagcaatatgtcacacggaccaaatcagaatgaatccctggaagaattgatgttggattttgaagggttggagtcgtctgtagttgcggcgaaaaaaaatcaaacacagttgaagagattgccgcaaagcaaggggaaaaagacatagaatcaaaaggaatacatactcgcacgctttctctttccagcagcttgttcttggtccgacattgttggtctgaatgtatttgcaagatgtttgaagttgaagagtttttgggggagaaaactttcggggaaaaggcggccccaagaaagtcgagcgtcggaattatatagaaatctaatgcgtttctacgtaactacgcttctcttttattgtttgttagaatgtattcttcggactatttacagtctcaattgcaacataggagaatggcaggtaaaatataggagtccacgcgtatgtatatcaacatcggatattgtagttactcgtactcttcgatcaccttggaaattcccttttatgttagcttaacggcttagtgccagagatcgacattaactagcccctctacggggtccatgtctgtatacaattccaacagcgtttgaatcatccggaaagccacatcggcttctcttttgcaggttgataggtccaacatcccaataatagcaaagcgcctgacagggatgtaccaactcaactcacttgggagtaactccctctgtactagccctggtacactagcaaggttggtacctacagtacagagtcctctctggggcatgaatattgaatatcagaggattgagttcggatgatgaggatgtgtgacattcttgcataatactgcggtggtgactcagaatacactgatctgactggctcatgttctagcaatgcctcttgggggccgtacaccgagaggctgctacccagtggatgagcagggtcagcacagatgtgaggccatgaatggatcggaatggcaaaggtgatacaaggaagctttgtcactaggcagtgaatctgccgaacaaggagcagctcttctggtaatctttgaggcagttcagagtgcctgtgatgcctcgctcgtgatctggaccccgccggtagcgaccggatgaatgtgtatcatgtaggctccagcacaagctctttgcacgatgacatgccaagggctcagttgccaccaagtcggcactgtgagagtgaaatccggggggagcccatatgtgacctggtaaccttagccagctaacatcaagccaatcacttgagctcgggacttgacccaatcagcccggaagagtttgtgttgggttggcaacgccccagtattccctgtgatgaaaattaattgcagcctataaccggtcagctgtaggcgctggacatgaaaaaacagagcggtcaatgaggatcatcacaattccaacgtgggcttccttgcacgatgcaatacggggaggccttgcacgccttaatcagaggccaagggctcaggagagcgtcatctttaatctccctgactttggacttatcctagaccagagaagccccattggctggaattttcgattggagcctgtctgttgtgtgttcggagcactgtgaatcaatttaagtagaaagggggcgaaaaaaaagtgcccgacataccaaccacaggaattcgacaaggctggtgttgtgtgttatactccatttattgcatcttcacgtcttcacgtcttgaatttccccttcttcatcttcttctcttaaatctctcatcttccgcatttctccttggcccggtattaatcccggctggtggcgagactctcctttttttcacaaaacccagctctccaccaactattgatcgcttcatttctattttttttatctttttctccctgaacttgaaactgctctcaagcaaacctgaaatcctcacagtcagggatacaagtcctaagagctctggtaagccaacgctcgtcatccaaaaacaatatgtcctaaaacagactagcgtccacgcgtgccgtcaccgaggactttctcaacttcttcatcccaccgtcagcagcttggagcttgtcaggagcaaattctttggaaagtcagggtcatgccgtggatagttaccaattcatttaagaggtatgttggtgtggttctaatttacccaagggtagactaacatcccatttcagaggcctcatgaaaacttacggacgaccaacatggcgcgtctacgatgatgagcgcgccgcgaagaaaagacgcgtggatgactatgatgaagctgaggccaatctgcaatatgctatccgggaatcttcagctgccgtgctgtcgagcccgtcgcgtcgtaattccgtgttgtcggaagacacgcttgatgatattgacgatctcactacaccaccatcgtcgccaccaccaagcttaaccccaccaccagcaaacacccgcaagccggcatttgcctttctcaagcgcaagcacaaggaaactccgaccgcatcccccttgacagaggtgaactcgaatagcgtacgcgcatccgtggacccaccaaaacaaaagggtcagaaacaacctgtcatgcgccaaatgcagatcgacctgggaaatgatacacgaaagacctgtgctacctgttctatggaatacatcccatccaatacagaggacgcggcactgcataaaaaattccacgagatgaatgcgactgggatcgacctgggcaaggcatttatgcgtgccaacgcctcgcgttgggtttacgaagcgactcgatttgacgaggggtatgtggtcatcgtagaccgcaaggcgtcccctagcgccaagagccaagcgaagaaagtactcgaggttgtcaataaagagctctcctcaccggatatcgatgacgagatcctctggagccaaacggaaccgcccaagcatttgcaaaagggctctcccgagaaagtagaccgttaccgagtcttcctgcacatgaaggacagtcgctgtgtcgggctctgcctaaccgagcgcatctgggaatgccgaccggtggtcaaggaacagaatggcgacgcacccaacggctctgtctcaacacgagaggaagtctgcccggccattgtcggagtctcgcgcatctggacttccggctcctcgcggcgcaagggaatcgctttagatctcctcgactgcgtggtcatcaactttatttacggaatggaaataacaaaggcacaaattgcattcagccagcctacggagagcggcaatcgcctggcacataagttcttcgagggtgaagagacatggcatgtctataacgagcagtgatggggttgacttgaatatgggaggtctttcttttctttaatttatctcacagcaatgagcgaggcatcgggctttgattgtgttctcgagcgtgtctttttatcttttatatgcttctgtaccatacctggacccttttcccgtgtaccatagggagctgggacgcattcgtttcaatattccaatttgactgaactattatctccgtacaagaacaatttgtacgtcttgtacttctttttatgcattttatttaagcctcgggcagccggactcgatctcggaaagcggcgcgtactgggaacctcatggataagaaactcggcggggacccctcaattcttctctttttctttttctctcgattctaacgtattcattctcgcgatgcctggatcaaatccttttcgtgttagaaacctgggtgagtattgttttcccctcctcttgagccttcccggtaacacggagtcataacgtggcgctgatgtcaatctggagacacaggcaatcccgcagctccattgtctaccaacccgggcaccttggcccctgtgccttctaagcctctgtccactccacctatagccccgaatggttatcccagaaagtcgtcgataccgctcgaacgcgaggtagctgactcgagctcctcggacgaagagacaaacccattcaacctgcgtgtgtcggcgagcgagagtgaggacaaaatcaatgcacataagagcccagctccccttgaggatgatcgacaacgagattattctgggtcagctccacatctagctccatcaacagatggatcccccatatcacccgaccacaacatgccgtctgcgacaggcgcagacagcttctatacaggacgtcatgcacggtcgtctatagagcttgatgcaagccccctcggccgagccagagacaagaagccgccacctccgcctaggagtcatcacggccgaagaatcggctctatagctaccgcagaatcatcccagaccgctcggtccaggtctactaaccgcctgtcaattcctggctcccctggaaatctgacgcttggcacctcgcatcccagctcggtgtctctatcctcggccgactacttctcggtcactgtagcgacagggtccacggactcgctccagcgcagccagtcccagcataagcgtcctccgacgccacctctcagtcgacggcacagccagatgcggagatccaagtctacacagtccaaaattaccagcagattaaatatgtcttacgactcggagagcaatgatggctctctgcctcccagtccgggcccttccagtcgggtggaaaacaagagactcagcatgcctccgccatcctcgggagacttccaggcgactgcgccgttgggaaatatctcactgaacctgtctccccccactaactccagaccatcatcactgaaggctggtcggcggacatcatcctatgggagtgtctctggaccacctccgcctcctccacctcggcgcactcgagactccattgcccgtggcagtgatgtgatggggttgaaggagaaccagtccccagccccagttccagtccctgttccagccccagccccacaaccatccaatgcccttgacatcctggctgatctcaccaaactgcagaaagaggtggatgatctccgagggcattatgagaatcgttagtgatcgaagggggcagcaggctgttttctctcacgttttagtataggagattgcatacatgaatgaacgaatgcatgaatttggcgtagtgattaccagtattgaatttctggtaaacacctttatggggaaagatgggcgggacagatattaaccatatggtggctattagtgaccatcacgatagctccggtttgtataaaataggggcgaaatataactatctaatattcattttcgaccgagtaaactggataattcagtatctcgtcaagaacagagcccctctgagtggaatagccgatcaatagaccaggtaatctcctattaatatggtggcccgcagtattgtccccatggccgttaactcgcgcggtatacgccacgaggtatgacgtggggggaaattaattatttagttcgcaaagtccagggccaagtccaccctccttccctctttctctctcaacttctcttttgacaactctcgcattactgactctacttaatttctaaagaattaatccatcttcatatcttcgcatcatgaatactcccacgctgatcaatttgcctcctcccccatcggaccccgtcactccatcggatatgggaccgtaagagctctctataactccatcttccctgtctctatacgtagcatggagtgttgactgacttgctaatcaacggagaaaatcagaggcacccccaactccggcactacatcgctgtccgctctttcgacaacagccatcaaagatggtcaccagggccaaccattccctcacagccaccatgcgcaccagtcctccacatcctccacaaccctagaggctgaacgcgcagaccgcatctcccgtctagcgggccttgagcgcgttgccacagcccgcgccggtggccagacacccactagccagcttctgccatatgctccaggatacttcgagagtcaagcactgaaggagcgcagcacagtcggcagcgccagtgcgactggcagcatcgccgggcgcacaacctgggcgagcagtagcgacacatacgacgccgacaagatgagcgagcacgaggacgacggcacttccagtgtcagtaacgtcagtgatgaaggtaatgccagtctcgtcggttttggcgagggcgccaacagtacttacagcgggccgatttctcgtccgcctggaatgagccgtgtgtcctctggaggtattgcaggacgacctacttctatcggcagctcgaatatcaatcgcccgaactcgctggcttcatatcttcagcaacaacagcaacatgctggggagagctccatgagatcgtcgtcgccggctgggtcaatcactcccgagcctatcaatgaggatgctcgcatggtggatggtatgacttttgactcggatgtcgttgatactactgtcagaactccacgactagtttctacgcccggtcacagcagcagtggatttggctcgccagcccgggattagtgtctggttcatgctttggtagattcaagaagttacgaaggcgtttttctttagtggcttgatgcctcgaatggatagctttttttttttggtgtctgtttcgaattagcaatgactacgcatgtaattctgagagaaacctgtgtattgagactcttctcttccaattattcaacctgtcgttggtaactacctgggtcttcactctaaagaccattgccacctgtcttttgcacctaaatctagacacctagacactatccttgctatttaacatagaataatataccagcaagctaccatatagtctatcaagctccaagccaagcctaaagcccataatctatacaatcggtgtcccggcacaacgcgtatactgcagatgacggcatgccgcctgagccacatcgccaaacccgagttttcttcctttcacttctcaaccaccccaactacctttcttcgcccgaccccttttgctggcattgacttgtctagcagtcttctattccgccgacttgctggtttcacttgcccagaaaccccacgaattcccaatccgagaaatacccccgaaaagcccgtttcgcttcgcctttgttcgactcccgttatttcaccgggaccgttgttcgctgcgagactattttggtcctataagttcgctttgtgattcgtgtttcttctttgaagattccattttactttgtgttcccgaaaagcattcgatttctcttcttttggtggattcattctagacccgcgagtcgaaatcaagatggctgctcctacgcaacttgcttgtacgtgttttccttccatcttctatgtccctgacttcaggtcgcatttggctatgcgggtggatgaatggttgctgataaccacacagtccgcacgctcaagggcattagcatcatggatgccgcccctgtctaccagcccctttctgggttcgcgaagtaagcattgagccagataacaaacaagggatgtcgctgactcgtttcccagaccggagggtaacctccgctgtagcggctactcgccgtgtggtcggtacttcgcatgggcatcacccgagaagtaagttgacttgccccccaactccacgtccaaattctaacattcgtctccaacatagggtcaccattatcgatccctccgtgggccaagtcgttggaaccatccccgccgagaacgtgttcgagcttggattctcgccactcggcacctatgtgatcacctggcagcgcacatccaaggacgagaacggagatgccgtcaagaacttgaaggtgtggcgtgccattgaggatggggacgatcacacgattgtgggaagtttcgtccagaagtcgcagaccggttggaacttgcagtacactgccgatgagcggctgtgcgcccgtaccgtgaccaacgaggttcagttctaccagagcgacaacctgtccactgtttggaacaaattgcgcgtggagggagtcgcggattttgcgttatcgcctggtcagactcagtccattgccgtgttcattcctgagcgcaagggccagcccgcccaggttaaggtgttcattgtcccgcagttcacttcgcccgtgtcgcagaagagtttcttcaagggcgataaagtccaactgaagtggaatgcttcgggaactactttgatcgtgcttgcgcagactgaggtggaccgcactggcaagagttactacggcgagacaaccctgtacttgctaagcgctagcggtgcattcgactcgcgcattgatcttggtatgtcttctcactatactacatgttgaactaactgacactccacagataaggagggtcctattcacgatgttagctggaaccccaactcgaaggaattcggtgttgtgtacggctacatgcccacgaagacgaccatcttcaactttcgcggtgtgcccaaacacaactttccccttgcgccgcgcaacaccatccagttctcgccgcatggccgcttcgtgctagttgccggtttcggtaacctggcaggacagatggacatctacgatatggacaagaactaccacaagatcaccaccgtcgaggcctccaacgccagcgtgtgcgcctggtcgcccgatggacagtatattctgaccgcgacgactagcccccgtctgcgtgtcgacaacggcgtgcgcatctggcatgttaccggcggtctcgtctacaacgaggagatgaccgagctctacgacgtcagctggcgcccgcagagcatcgagcagcacccgctaggcgagccgctcaccaaggtgcctgcgccccacccctccgctctcgcgtatatgggcacgcgcaaggctcccgtcaaacccgcaggtgcctaccgtccccccggtgcccgtggccagctgaccccgctcgcattcaagcgtgaagacgaaggcggtgccgcctttgtccgcgatggcgttcccggcgccagcatgaacactttcggcaagccccgtcgccgtgagatccccggtgccgagccctcggaggagtatctgcctcccggagccgcacccggcggcggcgtcgccctgcctgccgagaacctgtccaagtcggccgcgaaaaacaagaagaagcgtgaggcggccaagaaggctaaggaagaaggaaccgaggttcccgccaacgccccgactgcgcccagctcagaacgcagtcgtaaccgcggcaagaatggcactaccaatggaaacggtccggccaagtccacgcctactcctcctcccgctgctcctgctcctgctcccacccctgctccccctgctcccgtgtctgttgaggattcctctgctcaagataagaaggtccgtggcctactgaagaagattcgcgctattgatgagcttaaaatgcgtcttgcaggtggcgagaagctggaggacacgcagatgaaaaagatccagaccgaggatgcggtgaggaaagagctccaggcggttgggtatgatggttgattggaattgaacagagaatgcgtgatgcttgatgctcgacgcttgacgacgttatgcagattgcacccttgcatggatatacctatcgacccgcgtgtattgcatttggtataggagctgttcaggttgatatcgatatccgtatcaatatcaacaccactcactatcaatataaacttgaaatggctcatagaatatctgtaacagtagcctacaaatctaaatttacatctatctagaatatcacacatccaaaacagtcgatctgaatctagtcgaccagaaaagaagtagaaaagaggtgatatggcggcacaaaggctctcgattgtctgcgatgaacttccaggaaatttatatttcagaagaaagaattagaaatacacatagcattgaagacctgtctctcttcctaatgcgaataaaattatatctggttctctccctcaagatctccgacctgaacaccccaaacttgccacttagcttcttcaacaaagtccctccgcaaccacagcccagacggctgaccctgcgtcgaagaaagcagccctctactcgaaagatggtcgcgttcatcgccgggctgagtacgatccagccaatcaaatagcaaacgaagctgccagatccgatcacgaatttggtccggatcagcgccgcgaccgcgtgcagattgcacgatgttgcgcacggtgtgggacagagcgagtctcgcatctacagctgaggtacgcagccaaggtgggacggagacaagatcggtggtgatgcgcacggagcgcatcgggaaggaagatgggaggacgagggagcgctcgcggatatcgaggtcttgtagggatgggaggtggaagacccagtcccagggggtttgggacggagttatcaatgtagatgccttaccggtgagtagggccatgcgggttggccatgctgagggtggcaggcccttggctgggtttgagaggggaccagccgttgctgggaggatgtcttgggcttcgctgagcccggtcagggtggaggcgaatacggaggttgaggagcttggactgtaggttgccttgcggcgaagatagatggatgggtcgccgcggaggaatttctcgcgcagggcatcgttctggctgaaatctagaacgagcggccagtggtctggtccgcgaacctcgatacgggcgatgctgctaagatctggcagtagacagggagcgctgacggtgcgggttgtctcgtcgtgagaagtgatggtaatggggatcgaaattgggcggcgggaatcaagatcacgagggatgaggcatcgtggttcagcggcgagaacccaaagatggcggaaggcttggagatggcatttgttatcaaggacagtcgttgggaagatagggtagaatgcgcatataagcgcggtcacagcccggttggatgtgccaagtgtatagctacctcctccaaggaagagcactccgatagccatgtgtgccgccatgtgactgccatatggtgtatcagcgtcgattcgaccatggagcgagcgcaggcgccggaacagagctagatcacccgtgccggccatgactgccgcagcagatagggctaccaagtcttgacaattccgaaccgaattgcgggcgagtctagcatcgtagcttcgcacaggcagccgtgagatgcggataagctggtctagataaaacaacaaaagatctcgggcctgtgcttgtcccgatccagcatggcggagaccgaccgcaaagcagaggcctgcaataatgttgaagaatggcatatcttcgctgcgcagccggcgcacctcgctgagttgggatcgtccccggtagacttcgggcagactctggctgatccactcagcagtgggcttgatactatcccacatgatcaagtgtcgtgccagtgttcgtaacaggaagatatctggcctcacgtagtcgaagcgaacagtggtatcaggaatgtcaatcttcttcgctagtaccgagtcattcgtcttcatgaagataatcatgagagcaatggtcgcgccagccgtggcgcggtcgagtacatgagcgatttcgacggtcttggtacccacggctattgacaatagccgttcaacaatgtgcatatcccgcatgccccgcaagtcatcgcctttgccaaggttaatgaaaccgagggcaaagcctgcggccagacgatatccttcgtcgcggagttcttctccggtagcagcagcttgctcgtcctgctcactgttctcgatttccgagagcatgacctcgctcatacgacgatgctgggagccacagtaaagtaaaccgatacccataattccagcagtctgagtcaacggtgacaggttcagctcagctgctccaaatggaagcattcttgtaacatgtaccgaaagcaagcgtgtgattagagtatccattgtgcccaagtatgacgcagagagaccgagcaggagaccaattgatgtcatggtatgctttggagtgaggtacttgaaagctacccacttagccaacgatttaagatggccattcagacccagagccaacaagaacccggcatgacggttggtaagatcctgtggcttgttgaacaatatccacgacgtatcaatacccttcgacgccttggagattgccagaccggttgagactccgttgtggaagaaggcccagcagaccttttcttccgagaacgcagatttatctgcgctgacagtcacattgtctggcttcatgacacactgcagggaaaatgaagggatgggcagtttctcagtcaacaaaggcaatcggccactaaaagtgagcattgcacgacccgctggagtagacaacgtccggactgtcacgagctgcacgatctctttctgcgcctctaacaagtccgaatcactccagccaggttcggctatgcactctgccaccggtgctttggactggtttagtagtttacctgcttccacaaatcgcttatcctctcggaatatcagcctggtgaccgagtatcggtcagcctctgcagaagcctcaaacgcattggtggcatcaatatccaatgctgagctgctgatataatggaaatcccggacggcattatgattgggctgctgcggcgctgccaatgaactgggttgggccgggttcatcgacatgtaaaggtcttctctgtcaatcatttctaggagcgtggcgttccaggacgtggaggcttcaatctggcattgcatgacggcttcatagagcggggcactgacgccttctgggaagctatcaatgacactctttgtgaagccccaacgctgcaaaagcttgattttttccaaaggtgtcgatacactgtgaacctcggtgaagaatccattcaacgcacacgtccttggtgtgataccgaaacattcacgccacattcgccctttcctgggagttcgctcggctgcattcacaatatcaaggagagaaacaaatggtgtggggctccgatgagcagcagctcccatgagaaattcgaagatggacggaggcggaaagggttcggcgggaaccttcagcccagcgatatgtgtattatcctcaaactgccagcgctccatactggccatttcggtgccataatatgcatcctcggcccatgtccatgattcccatcctagccagctgcccagttgtgcgataacgggagcaagcaaacctagaggtctttgggattcctccgagtcgcaggtggagagcttctgttcttctcgcaatagatgcaaggctacaagaacactgcacaatgcggtacatcttgtgttttccgagaatgcttcagagatagggagatagccgtctcggccagcagccctgaggccttcgggactctggaggaattcgcggctgagggcgatgcaccggatcaagtacgaattctggcgatatgtagaccgacttgcattgacacccttgggtgcgtctcctgacgcgagactctcaattgcatcttgttcaacgatccatccccaggaaccgtccatcatccacggagctacgacgccggatgagccagactccaggtccagcatggactcccagctttccagatccaggtgtcctccactacttgatctaagtagaccctttttgcgacgcgttcgtttgggagtctgcgtttgtggaggggtgacgaatggggctgctagactcaacaagacgactgtcatggcggtccattcaatgttgtcttcctctttgcctcgaagccatttcatgacttcccaccatgcgaccgtgatgccatcgcccgctttctcagactcacgcaaggcaaacatgcagattttgagtattttcttcaccagttcattgcgaggctccattcgaatttggagtctgtggcgctttttatcagtgtctaccaggtcgactttcccgcgggagcacccatgatcaaacttgttgaagacgaggctgggatctgccatgactcggtggacgccactttctcttgggcgactctcgagtttgttggcagagatgccatccggttcatacagctgcagtggaataggaacctcaactttgacgggactaccccacagggtttgcaatgatagctcgcgttgtccactttctgtttcgcttagtgagagtattcgcgaaagatccccatcagagattctacaagcatccaaaacgtttgagacattttggatcctaaccgcacgcacgagtaatgaggtcttggactttttcttccggttcttgggggctggctgtcggtcggccctcagattcacaatagttaatttccgtgcctcctggtccacgatgtatacagctaggaaagttgtgttgcctttgtgggcgcttccaaactcggtggatgccaatgtagagatcttcaaccggcgagatgctgactctttttggaagctgcccgagaattgggacgagaaactttcaaccttggtcaatataagttcttccgggagtccggacgtcgattcacgtagggcaatgttatcaaacccggaagatagactgtcattgttaagctcttcgagtagcttgtccactggagtatccagaaagctgcctgcagtgctgtaaacagaccctgtgcctggaggtagagagcctcgaggattgaaaccaaagcttccacgcatgcttgctccgagagattgcctgaacccagcaccatgaggcatgttgctggactgactgccagtagccaggtccgaaaaagtgatacggtcctggctagttgcaaggtctgttcgggcgagcagtgagctgactcgcctcgatgttttgaggggaacaccgacatctccgaagtcttgggctactctcgaagccaagtcgtcttcggcatcattcctcccttcagataactgagtggaaggccagttgtcagttcgaggcccgaagctctctcggcctgctccagaacgagcggctggtgttgtcgcgccagtcgccatcccgaaatgtgagcttcgccttactgaccgggtacctcctgtttcccgtctggttttatctttcatcgagccgcctgattcatcatctttgtagtgcgcagtccagactgtataaatacctgtagttgtgttgatggtaacgactaggatcaaaggaccactatttggtctgttgatgcccgagagttcgtcttttggagagatatacacaatctcatccacagggtccagcacctctagtccagacggcctttttctggtgctagtgatgctgctctgaagccagcgggaagtttgcgacgtcacaactaagcccatctcggaatgagggttaatgagagagaaaactcggggtaggtcggtgcttgaggcggtatttggcacccaggaaggacctggagcagacgaggatttcgtcgatggacgcttgtttttgctgagagaaaatgactgagaggcaccgggatcaaatagcgaagacacgaaggaattaggcggcgcagtcggttgttgactgctactattttcattctggacctttctttggaaaataagaccccgaggcgtagcgaagacggagtcaacctcaaatgggaggggaattgtatgactattgcccgccacgaagaagatatgagcttgcgatttgagaactaccaccaacgctctagaaagagcctcgttagagtgctggggagctacaaccgccactcgtgcatctccatgtagatccaatgttgagaaggtttcagtccgcttttgtttctgcgtgccagtagttgcttcaggtcgacttggaggcgtgggtttggcgcgtttcgtgtcttcagcggcaaaacgagtgaatagagcatgtcgaatctcttctttctcggggtccattcgaaatactcgcttcaccatccctgcgcgggaccatacaacacagtgtttcgtccatactaactcatcgtccaccgggccagtcaatccgctttcgtccacgcatagcgtccagttgtaatggtcttctgaaggttcctgagggagaattccctctgcgactaagtaggagatggccgagggttcgtggacgcccaaagagcgaactgacgccatggtgggctggttaacagccgtagcgatcgtggtgcgccgtcacaaacagttctgcagtcaaactcgttgaaatcatttccatcgctcatataagtcatgcaagttcaattaacggtgcgctaagaacgcatgccaagtggttgaatggcgaagttggaagacgcgctggaacgcggattggatcaagttgtcttcgctttccccgaccaaaacaacttcctttttccatctacccaaccctccactctccctacctctaacatccttctctcaatctgcttttgcataggaacagacgttcagttatcagatcttactttgactacaagtcttcgactgtctatcatccctgcagtgcactgttgcgcctgtgctcgaagctacctgtagctcgacagcatcgccaactagcataatgccctcatttcccactacgcccttggtgcggcctagggaagatggcttgcagatcaggtatgagtgatgcgcttaggtcatgatacttgggttgacgctaatctcgttaatgcaaaatctttagctatccgctctcccatcgcattcacacagcaaaaggctacccacttcgagctccgaatggctcctcgatcatcatttacggttatgatactggattaaaaattgtgtggagaggagggagacggtttgcagaaccaaagctgactcggcctcaagcgaagcccaagccagcaggaagtaatgcggattccgattcagtcatgattattgactccgatgacgaggaccctcaaccagtacaagaagagcctgtggttgaattcagtctagaggaaagcgaggttgaccctgctgctccgtacgaagagattctgcgacaaattgatattccccttggaagccaggtgctagaactggcggtgccccgtgttctccccgaggaagctcgctcgcctttagaccccttcccgcctatactgcgaaacacaattgttgtgtcggtagtttgttcagacctgtcaacaaaagttgtgactctaccacttgtgcctcctcaccctacgcagacggattcaaaaagctggcgtatccaaaccctttcgatcaatggggccaccactcatcaagatattccacgtggtgtatctatcacattcacctgtcatgaatttgaggatgagcaagaccagcgaaagtcgcggggccgatttggaaattttggtaaatgggatctgcttgtggccacgcattctgcagaggggtgcggcgtgctgttgctgcaccggattccgatccgcgaggaatcttctttgcgtctcgtggaagaggacattatctctcaacggcgcctcttgccggcacctgcacagacgattgccttcaacccatccacatggccatccgcccgccatgccaacctgcttgtcgcattctacagcggatgtgtgaagatttattcctgctttgttaaaaaggcctcgagatctttgcgacgggcttcgatgccagtagaagaatatgaaactatcgacacggaaggtcgctggttgatcagtttgtaccccggttttgagcaagggcccggcggacttccccggcggaagagaatcattgatgccgactgggtgctcggcggccgagcagttatggtgcttctcgaagacggcgaatggggcgtatgggatatcgaaggtgccggtcctggggctgtcaagggcccgctgcaacgtcagacgagtgtccaaggtgtgactggcggttccttgacagcatacgctgtctgcggtcgtattatgacaccactttccaacaccaactccgaaacagagcatcgaccccggtttgcgcctatgacaccatccacaaggcgtgtacgtgaagatggattgctgaagggatcgatgagcacagccagtccgtctcaccgtggccaaatctctgtcttgcagacaaatccatcctcggacgtattgcctgacgagtcgatcctgctccgtcacggccgccagagcgcggtcatcacgagcttactgtctctgtggcgcaacgctgtcaaaaccgccggcacttttgattcatcgaaccgatgccgcgtttctcctttccaggacgtgaatttgatgggccagaacttccaagcaattggacacatacctgcaccggcacgccgatcccggcaagcgctgcggcaagtctgggatgtactcgtggcagcagagcatcagattatgattctcgccccgaagttgacagaatccatcgaggaaagcctgcccgtagtgaaacaggaagaaacagaagagaccgaccagctgatgctccaacgaggcgaactggatgtggaaggaatgggccgcctactgaatggtatggccggcggaaacgcgtctatgcgtatgggcagccctgtaaagcggactcgcgtgttcgcctgatctcagtcatagtctactaatacccatactccaagtttcttgcttctgttatgctcacgttctactcattcataggatactattcgcgctgtaaggtggagcgcaaggcgagatccatgccttgaaattccttcctcggaagtgaataagctctgtatcggatgcgatatatcaatgaccattgcaaaaagtgctatgcacgagccctgacattgcaattgaatgttgcagtgcaacattccgttacaattctcgtatttggctttgggttcgcatcttcgtctctgttctactgcggatatcgatctgtctctcgacgaatcttacatcgatggccgcggggggcagaggaggggatggccaaagttggatgcgagtgaatatgggtatgatgggacatttcaattagaaagcgtagatgtgtacctgttacaactgaatattatcatggcttttttgtactatgcataagcatatatatcatgttagtttcctcaaccgaacaaaatataacaagatcatctatagagatcgatgttggttttccttcaacaatccacgatcaccaccccctcccttttgccacaaccatataccctcaaccgcccatgccgcagcactagcatgacgaccaacaccggatgcaagaggcaagttactaccctcggcatcttttgcattcttgctcttatctctaccctgggtctgaccagcagcgccatcggcctcggcaagcataccagcaacaatgccttccttttcaataacgaaccagagtccatcggacagctgcccaccccgctctccaaactctgctcgaccgagacggaacaagatccggccaatgacctgccacgcgatgcatcgttgcgcggggaacgtcgagcgtgccagaattgccagctcggggatcgtgtagcccgcggcatgcggatcctcgccgtgatggtgcaggcccatggttgtcgggagggagagggatgtttcgggggcaaggatggttcctcttagtgagaagcggattgccgagggcgccattgagatggcgttgctggctgggtggtaggctgacgtggaatctgggtcttcttcgtcggcagagagaggctgcatccaggagagcgttgatggatcctgtgctatctcggggaagtagtgtgactggagatctgtcaggaaagacggtgaagatgggtctaggactggcatcggcgcttttggctgggggaagtggaaggtttcaagagtagcggggtcaagggagggccgttcagaggccgggcggaggtcttgtgggaggtttggtggagcgagatcttcattacgggggtgcggcttaggtgatggtttgggtagagaatgttgtgcgcttggagcagaaacaggtgcagacgaaggagtgtcgaaggagactgatttttttggtttaggtttttcgtcggccacaggtgccggcggttcaaatccagtcttttcatcttcttcaatatttgctctgcggaggaatcgtgcaagaagtcctgggtccatctgttccatcagctcctctcgctcctgttgaatctgcgcgtctgacattgccgccagctgacggcggttctcctcatcgatggatttcttgtcatcttggacggtcggttgagtaggtacaggagtcggaggagtggactggtttgctcgtcgctgcttgaaggaagagggcttgcgcgggcgaggggcagggaatccagtcgatgacgacaaggtcggcaatttaggcgcggggggaatggcggtggggggagcccgttcttggatctccccgatcagagagaagggagagggaatttctggagcaccagattcaccatccaggtcgagaaggaagcgttcacctcgaaaagccatgatgcgtaaatactggtgaagaggagaaaaaaaaggttatgtcagcgcggggagatccaagatgcggctcccaaagctaaaatggggctgcagaagaggctaaccggaatgggctagtggaagatggcggatgtgctagtcccaattggattcctcacattggtccgtggcatctacaatgttgtatacggcctgcgttgatttttctatgctatgaaagaccgatggaagactggttaggatcattcatctcgatggaaatagaaagaaggatgttggaggggtttttcctcagctaaacggttcttatgcacgtcgacgtcgatattgtcgtacctatcatgaacttccacagggaatacacaggcaggatcaatattacatagactctattgtctataagatggaagaaatagtcagtcgaaaccagatataatcccaaaatatagcgaacatctgatttgaatcacatgaggccattcggtaaatgaggccattccggtatcaggtactgcgcacaatttacggttctaagctcaacgatccgcaagggaataatggatatggtctccaatgctccgtgacttcaggaaacaagaattctacacaagatagagggtaagtatagcgccatgctccctctctatataccgttctatagcaatttccccatatctccgacgtactatagagctggacatatcaaattgctagtactttgccaaatgtaatgtgctgtttgatccataacctgcttgctctcgtcccctttcttccctttttccctctttttttcccgtcgtcttctccctttctatttctgctttcgctctctttttcctctcgacattttccccttccccccttccgctcctctcgcttttttttttctgcttttcccgcgcttcctggctgttttctctctgcctcaccatcttatctttctggtgttcctcttcccccccaaatctctgtttgccgacctgataccgacacgtttcaccactttgcgtcaactcaacgccttcatcccgattttgactaattccatcactttgtcaattttcggtctgttaattggcattggcattgtgctaaattatgtcggaccctgctaagatggggatacaaaaagaagaagggcccattgacgatgtcaaatccggagcaggcgcccgacgtgcctccggtaccgccaggcggtcgcgtcgtaagaaggacgacgaccccgacaaggacaaggacaagaccaaaaaggacaaggaaccgaaggaaacaaaagagaaaccggtccgagctcctcgccggccacgggagaaatccaacaccactgcttcccggaaaaagcccaagctggaacccgcggaagaaagggctgctccagacgctcgcagccctccacatacccctgcaacgcctcaacctgcacagcccgctcagccaactcagccaactcagccaactcagccaactcagccaactcagccaactcagccaactcaaccaacgcaacctacgcaacctcaaatagctccaccgcctcaacctcctcaacctcctcaatctgctccgtcttcatactcaaatacaccatcccatacagccccaggagcttcgtatcagctgtcgcaaccctcccgcccacaatcgcaacctccagtaccgcaaccgccacctcaacgaaccagcgggcaaaacttcgaccccattcgctctgcgttcgacaatccatcgccagcgccatcatacagtccttctactcgcgcaatctctcctcgcaatgcttatcgtgccagtgcatcgccggcgatctcaagcattatcgacccaccagcccagaactctcaaccaatttacaacacccttcaacgctcctcttctggccatgtatccggcctctcttcgccagcactgtctgcgatggtttccacctctccacatccgtccttagcaccccccgtttcctccgctgcccgtggagccatgcacatcccgcaggccatgtcgcagtctaccccctacaccaccccatacccacctaccgagcagcggccaacgccatcacaacctcctaaacccgaaccgtctccgccggtgcaacctcagcctcccgcgcaacccgaacccgctgtgcagtcgactccgcccagacaacaaccaaccgattcaatggaaatcgatcccacagagcagcttgaacctagcgccaaaaaggaaaagagtacagctactgcaccgacatcaaaggcctcatctcccaagccagcgcgatctgccaaagatgctcctcaactgccccaaggatctggcatgatcacaaacgcgctgttcggcggaggagaggaacctgcaaagtcgcccgactcacgaagcgcacccagcatcatcgttcatgttccgctacaaaagggcaaccagattgtgaactttgcacggcttgcagaagagcaatatggcttcgctgccttgcaccctcgtctggccgctcacaaagcccgcatggctcgagtggcagctgctgcggccgcgttagaacgaaatgataagactgccaaagggatatctgccggcgagagtgccgatgaggatctgagcctcgatgcagaacgcgatagtgatatggatggcgatgttcccatgggtggcactggcacaggaaccaacggtgcgccctcggagactagcgatggaaagaagaagcgacgcaagaaggtcgaggaatatgaccgtgatgatccatttgtggatgacaccgaaatggtgtggcaggagcaggctgctgctagcaaggacgggttctttgtctacagtgggccactagtcccggagggagaaaaggtccaagtggaacggtatgtctactcattgtccccttactgcacatttactaattatctgcagcgccgatggtacaatcaaacgtggccgtggccgtgggcgaggaacaggtcggactcggaccgtgacctcgcacccacacgttcctattgcagctgccgtgcccgtctcccaagatactggcctgccattacgtggacctggctctcgaggtggcacctcacgccgaccgcggggcaataagagagccgatggtggcagcgaccgcgctgctaccgcagccttcgctgcatccgcttcccacgaaagccgtggtggccgtggtggcggcactgggagctctggtcgtggtggaactaacagcactcgaggtggaaagtcatccatatcaatcccgatgccagaccttgctcctgcgccgtcgggtgttgcccatggaccccctgctcccagttcgctatctagcccagagctcatgatgaaatagagaacatgttgactgatttttcgtggcgtttgtttggtggtcggagcttgatgactttgtttagttttatttgcgctatcattttgctcatgggtttgatttgcccacctattacattgttttttgttgtcggactcgagaaacgttgcttcgtgaacacatggactctctacgtacacctcggttatgttattatggctgaatatcttaattttcagccaagatgcttccaatggaacacgcttagactaagtcatccttaggcgcctcggatattgagtttgttttaccattgtcgattctttgtatgaaacaaaggtggtgtttcatgttttatggtatgaaacaatatgcaaagtctaaagtactctatgaaacaaacctagaccggtgtctatatagatatgcttccaaaagaaccgtattactagtagcaatattttatatcaaatggaattaccgacctgttctatatttatccatcctctaaagacatgagtgcaaaatctagaataagtggtttattggaaatatttatcgggcgcatatccatagaaagagtatgaaattgcacttatgtacaccgtgtaatgcaggaagacatcccagcagccaaagatagaatcggaaatgaacaaaatagggttcgttgccagatgtttctaagcagagtcattgaatgagaagtaagaagaagaaaatagaaaaagagagagaagagagacagagatacccatagatcaatggaagaaaaaagaaagtcctgttagggcagcttgactcgggctctctttttttttgttctatcaagagcgccgtgataacacaccagacagaacaacacagccgacaaggaaataacagatatccacgatcatcaaagccgaaatcgtatcacatcgacttttcaggtgtatgtgcacgttacctggacatagacatgacaatggaaggaaatagaaccaagacatccaaatacattaactagtcatcaccaaattaccgggccgtacttcctggttgggtgcgccagtttccgcctgatggaacaggcaatgggggaggcgggccgttcggaggcgcagtgcgaataggcattgccgtggagtgcaggttcgtacggggattggagttgttggagctggcggagcgagggctcatgaatgggcgagatggggcatcgatggcagagacaggctcgttgagctgctgacgcatcgcgcgacgaccgtatcggctgtcctcgtcgtttgcttccagcgagaggtgctccagagaggggggtggtggagaccgtgtggttcgagacgaagacgatgagtaatattgaggctgaggctgggactggggatagtgacggtagctggatgggaactcgttggcgatctttagagggatttcgcctgatgctgggtttgacgggaatggtgactgctgtggggttcgtgtttgcttgttgacgagagggggtttcccgatagtgcctgatatgggagctgcggcgggagacgattttggggttggcttcgaggcctctctagagagttgggttgatattggtggtcccaaataggacttgcgcttttcttggtccatcatgctcattgcccatccttcgaggttgactggtgtgcgcttcgcggcctgcaagaaggcatctttgtcctgaaaggagttagtacatgtgaaaacaagctacaggtcaaaaagagagatgaacatacataaagctctcgtggggttgggcgctcttcggatttcttcaagagacacttcccaacaaagtcatgtaggataggcgggaaggcatcgctcttgggcagcttgggcgctgtctcgtgcacgatttgctggagtagatccaaaattcccatgggccctgtactggcacggtttccggcaccagagtcggagtgatcgaaggggaactttccaacagccagctccatgaccgtcaagcccacgctccacacgtcggaacggaccgtataggcgcctccctgaattcgttcgggagccatatatgtggaagtgccaacgaatgtatcggcaatcgagttaactgtctcagtagcaacaccaaagtcacagagcttgatgttgccgcgggaattgagtaagatattggacggcttgatatcacgatgcatgatgcggtgggtttcgtataagtagacaaggccagccaagacggactcggtgatctttcccagcacatcgactcgaacagggccgaaatctttagaaacgcggtcgagagatctgatggcccgtcagctatatcctctttgtttctcatatcggtccacctacccgaggtccatatattccatgcatagcacaatatctctcgcttcgttttggaatgcaccatagaaagtgacaatattgggacaattgcagtcatgtccgactcgaagttctcgtagaatctgtttccgcacattctctttggcttccacacggataatctgcgggcataaggaagattagagctgaccaacaagcaagaacacaccatagacaatacacacctttcgagccatcaccaccttggtagatgcgtgcatcaccttggaaacagtacctccattcccggcgccgagttccttcaatgtgaccaggtcttcactgcgaagatcgaggcgaaactccagaccgatttcgagcgtatctgtgttgctaagttcgctattaccagcagacccagtctgtccatcgccatcggcaggtttaggggctgcattgagagcaagacctttgacattctttcgtttcaacgtccgagccttgaactggtccgtcatggcgcctggaggggttggagttgcacaaggggaaagttgtgaaagaaataaaacgaacagcccagcgcctgagtgatatcaagtccgggttacccaagccgatgggatcagagtggtcaaaacgaacccccgagctagcagcggggaagtcgatatcaccttgcgatgttcttggcgacgctgattggacctttcgggcgcgtcgcttcgaccaactatgaccaaaatgtgccggtcggcggcaaacagatattgggcttttcttacaggtatgaagggagaaactgggagatgatcttcaagaactatgaaagccactgcaatcaatgaaacaacaaatgtttcgggggttccaccggccttttgggctagcttgggtacttgtgactttacacaacggggtttacggctaaaatgaagtggataacactgttcaaactcgggcacgttcaatagtctcggccctacatcaatagtgtaaagcgatatgcataatgaggatccgaccagggcatggttgaatgtacacaaagacatcagcacgtgacacgaatggcttaagccacaatgaggctacctcaataggactagcgtctagccacaccagcactatccaatcaccgctacccgcgtcctctcctcgccgatggccgtgattcttcctcttgacaactattgcttcaattccacctctttgtctcacttttgaccgagctaacgagctgggcactacctggtgtcgcatctgcgccattctatcttgaatctttcatccgaaatcgcattcttttcggtccctagcaatagggatctccacttcaagatgagccttcgcgacctaatcgagggtgaggcagttatggatgacgacgatgaggaagttgccgacgactatgatgctgagggccgccagggcgcaggtgccgccaatcactacaatgactcgagcgaggaggaagacgaagaagaagatgacgaggaggctgctcgcgccgtcagttttcgcctttcaccgggttgtatctctttgctgacgaactattaggtccgtgaaggtttcattgttgatgaagacgaagaagacgagcgtgccgcccgcaaacaccggaaacgtccacgcgctgctcgcgaagaagagcaccttgatgaagaagatctggaactcattggacatggcccaagtcagcatcgtggaccagctactgatgtatgtaagccgcagctcattacttgacaagattctgatgctctgattttagtcaaagtttaagcgcctgaagcgcggcaaagatcgcgaaagctatcaacagtctcacggcgttgacgatattttcaactcggacgaagaagaggaagcgcaaaaatatgctagaccaggccagcgtcgtggtctgcgcgatgaaatggacgactttattgaagaagataccttctctgacgatgaggctcagcgtgaacgggatgaccttggggttgcgcctgcctccagagtcaacaagaccggcttgattccgactgacacctcgggcttggatgaaaatgcacttgaggatatgcgcgctgcatttggtgatggcacagagtacgatttcgcactgcaaatggaagaccaagaggacgccgacaaacaaaccgaagaacgtcacctagatttgaaggacgtctttgaaccatccgagctggctgaaagaatgttgacggaggacgataacgaaattcgtctcctcgatgaacccgaacgccatcaggttgctcgcaagccctataaacatgtgacattgaccgaggatcaattccgggaggaggcagtctggatttcgaacttgatgctactaaagaagcgcatggatcccgaactgcgcgaaccattccagcgctccgttgctaagatgttagaattcctgatcacggacgattgggaggtacccttcatttttcagcatcgcaaagactacatgattcatgctgtcaaagatatggccaatggcgccgatcccgacgacgagtccgccaaatacagcatccgggccgagaaactcctcaatatgacagatttatgggatatcttcgaccatgatctcaaattccgggctttgatcgacaagcgtggtacaattaaaaagacatacgacaatctgcaaagcctcttcaatgtgaatgattccaacgtcgaggatcaacttattgcggccacgagcatggaggagcttcaagatgtgcaggactatatccatttccagtactcctcacagctacgtgatctcaaccaggtcaatggcgatgctactggagaaacacaacgccgaaaagccaccggaagatctttctttgagcgtgttcggaacggcaaggcctatggcttcgtgcgtgcttttggtatcactgcagatgcgtttgctcagaacgcctccaaggaaggtcgccggcaatacaccgaagatcccaccgagcagcctgaagatttggcagatcagtttgtcgacaatgacttttctaacagttcgcatgtcctcaaagctgctaagtcaatgttcgccgaagagcttgctgtcagccctaaaatgcgcaaggtgatccgtcaggcatactacatgaatggagtcgtggattgcttccgcacagagaaaggacttcgccggatcgatgagcagcatccgtatgctgaattcaaatacctgcggaaccagcagctaagcgatattgcccgtcgcccggagatgttcttgcgcatgctcaaggccgaggaagaaggactcgttgatgtccgggtgaggtttgagaactttgaccagttccgcaaacgtctctacgccgatatcgagtcagacaactacagtgagcttgctgatgcttggaaccgtgttcgccgtgaggtgctggatttggctttgggcaaactggagaagttgatcaatcgcagtgtgaaggaaaatattcgacaggaatgtgagaaccatgtggccaaggagtgccgcgaagcgttctcacaacgtctcgaccaggccccttacaaacccaagggcatggtcctgggcacagtgccccgtgttctcactctctccaccggatctggtcagctgggccgggaccccattcactgggcttacacagaagaagatggccgtgtcttggagaatggcaaattctttgatctttcggtaggagatgagagccgtgacattgcagatggtgagaacctagccgcatttttggatctgatggatcgtcgtcgaccagatgtcattggtgtttcaggcatgacgccagagacgcgccgcctgtacaagcttctatccgaaatagtcgaacaaaaagacatacgtggtgcatcctacacaaatgagcacgatgaggagatcagcgacccattagaggtggtcattgtcaatgatgaggttgcccggttgtaccacaacagccctcgcgccagaagcgacaatccaggctttggacctctaacccattactgtgtggctctaggccggtacttgcagagcccgctcaaggaatatgcatccttaggccgtgacgttgtctccatccagttcaaaccaggccagcaactagtctcccaggacctgcttctcaagcagctggaaaccgcactggtggacatggtcaacttagtcggcgttgacctcaacgaggcagtggcggacacggcgacagccaatctcttgccgtatgtctgcggtcttggtccccgaaaggcggctcacttgctcaagattgtcaatatgaacggcggagtcgttaacaaccgggtagaattgcttggtgtcaacgcaacatacccggctatgggtgtcaaggtttggaacaactgtgctagtttcgtctatattgacttcgagaatgctgatcccgatgctgatccgctggataacacccgtgtgcatcccgaagactacgatattgcgcgcaagatggccgccgacgcacttgagctggacgaggaagatatcaaggccgaaactgacgagaacggcactggtgccatcatgcggaagctgttccgggaagaggcacaggaccgtgtcaacgatcttattttggaggagtacgcagagcagcttgagaaaaacctcaaccagcgcaagcgtgccacactcgagacgatccgagccgagttacaacaaccctacgaggaattgcgcaagcactatgtcttcctcagcaccgatgatattttcacaatgctcactggcgagacgcccgactctttaacacctggtatggtggtgcccattgctatcaagcgggtatttgaggatcacattgaggccaaattggattgcggagttgatgtactcgtggccgagactgaactcggcgttccctacgaaatccctgtacgcaatgtataccaagtccaccaaactgtcccggccaagattctgttcttgaaccgcaagggtttctcttgcaacgtctctctacgtgaggatcaggtcagccatccatctcgtcggaaccaggatcatggcttcggcgattgggacgaacagcaagagaaagccgacaaggagtcgctgcaagaaaagacgcagcgtggcggccaagccatgcgtgtcatcaagcacccgcttttccggccgttcaactctacccaggccgaggagttcctaggttctcaaagcccaggcgacgttgttattcgcccgtcctcccgaggtcccgatcacttagctgtcacctggaaggtggcgcaaggtgtgtaccagcacatcgatgttctcgagctggacaaagagaacgagttctctgtcggccgtgtcctcaaggtcggtggtcggtatacttatagtgacctggacgatctgatcgtcaatcacgtcaaagcgatggccaagaaggtgggcgagatggtattccacgagaaattccaagaaggcagcaaggccgagacaggtatgtttttgataatttatcccatctaactagcatccgactaacatctaatagatcaatggctcgatacttataccaaggccaaccctcgccgctcggcatatgcattctgcatcaaccccaaataccccggttacttttatctttgcttcaaggcaggcgagcatgcacgacttcaaaactggccggtcaaggtgattccccagggctacgaactgcagaagaacccctacccggacatgaacgctctatgcaacggctttaagctgatgtttagcaacatgagcaagggcaaccggagatgagtgtttctcgtctgtacagtgtactatctattcccaaaaaaatccccaaatcccgaaaagatgggatggaatttcctacttcttttaatttgatacacctttggcatcgggcatgtaaacaatatcaatgaatttcaagcgattcgtggacctcgagactgtatagaccggattacgtaggctgtatacaccgtgtaccatttgaactcatcctcggtttcaacattgtttcccactttcgcccctcatatttcctcgcatttcctcatatttctttgtttaattgaagcttcagccccgaatgcttcctgtgatgtcaattgtatagtgtggcttatcccccgcatcgccacgttcagccgcaccggaccgcgacggacacattgcggttcttgcaacccctcactgcgcaattatggcggccatggaagagctggagattcacagcaaggtagggctggaacagtgacagtcaaagactcaagctcaactaatatctttagtcgtactttgtacgttggattaatgtcagcgcgaactacaccatctcctggagtatccaaccgcacaagaagtccgtcaactttggcatcttcaaacaccccggcaaatcgtctgttctgagctcccatatccctgcctccgattcccaaagcaccgattcaaccgagaacctgcccgcaacggcgacgactgccggcgcgcgtcaacaaccatctgctgttatcgagaagctgacggggattgggctcaaaccaatcaaatggacgggcaagtgtgaggcagacaagattacccaggggacctacgatgtaccgttcagcgaagggggcaactatgccctcgttttcgataacaccttctccaaacaaatctccaagaccttgacactcgtcctcctcacctatccgaccggccttcaaccacctagctccgtatctcagccaggggcgtcgaccgagtcgctgccgcagcccaagacccgtcgacgaggcaacagtcgagccacgctcaactccctgcaagttgacgcatcgaaccaaaatgtctacactggactgctgcagaagcggcgacgaaagcgtcaccagggttgggcacgccggttcttttcgctggactttacctcgtgcacgttgtcatactatcatgatcgcaactctgccgcactgcgaggcgcgatcccactctcgctagcggccgttgcgaccaacgaaaagtcccgtgagatatctattgattccggtaccgagatatggcatctgcgtgccaataacgatcatgaatttggtgaatggaagagtgccctcgagaaagcttcctccaaggaagcttctaaggacaagaacaatggcagtctagctgcccctccggagctgcggcttttcgccccatcgcagccctcaccgatggaggagagtgaatgggctcgcgttgagagccttgtcagttatatttccggatcgcgagatgcgatccgccggctagccaaggatacagatcccaagtatcttacctcgcccctctcaactcctatcgaccggcctcgttcgcgtggccggtcccctagtccccagcgcagtactcatgaggctacccccagtgagatggaggccaggcgcccgttctggaagcgcaagacaagtggacaattgaatgccaacagcaagcgaccatcggccatgtccacggactccagttcctctcagcttgtggtgcctgctaccgagggcaagggaaagcctgccagtatcaccagtcccatagacagcatggatgagattcatgaccatttgatgactgtgctgcgcgatcttgacaatgcggtcactgagttctccacgctgattaccgagagcaaagagcggcggcacccgccccagccatctatggttcctcnnnnnnnnnnnnnnnnnnnnnnnnnnnnnnnnnnnnnnnnnnnnnnnnnnnnnnnnnnnnnnnnnnnnnnnnnnnnnnnnnnnnnnnnnnnnnnnnnnnnnnnnnnnnnnnnnnnnnnnnnnnnnnnnnnnnnnnnnnnnnnnnnnnnnnnnnnnnnnnnnnnnnnnnnnnnnnnnnnnnnnnnnnnnnnnnnnnnnnnnnnnnnnnnnnnnnnnnnnnnnnnnngacgcccgcctcagccatctatggttcctcgccggagtatggagtctgacatgtcgcaagaattctttgatgcgacagctggaggtggtgacaggtctcccctcctgactatccaggacagcgacgacgaagggcctgaagaggaccggcctgcctctgctgccgaggcagtccaggatgatgccccctctgatagtgacggtgaatgccacgcggcagcaactcgccaggaaagcagcaccgcatcgggcatgttcccagtcaaacccaaatcgttggttccgttgcccctggagcctataaaacgccgggcgaacattctcgccccaacagtcctacctccaagcttgattggcttcctgcgcaagaacgtcggaaaggacctgtccacaatatcgatgccagtgtccgcaaacgagcccatatctcttctgcaacgcgccgccgaggtcatggagtactcaaatctgcttgaccaggccaccaaatccacagaccccattgagcgtctgatgtacataaccgccttcgcaatatcctccctttccagcagccgcgtccgcgagcgttccatccgaaaaccattcaacccaatgctaggcgagacctacgagctagtccgtgaagatcaaggcttccgtttcatctcagaaaaagtctcacatcggcccgtccaactagcctaccaagccgatagcaaagaatggagcatttcgcagtccccgatgcctagccagaaattctggggcaaatccgccgagatcacaaccgaaggccgcgttcgcattatcttacacagcaccggcgaccgctatagctggacgccggcaacatccttcctacgcaacatcatcgcaggcgagaaatacgtcgagcccgtcggcgagctagccgtcacatgcgaatccaccggccaccgctccatctcaacattcaaagctggcggcatgttctctggccgcagcgaggaagtctccacccgcgccgtcgacgcaaacaacaaacccgtatccctcggcttatctggctcctggccctccacgctaactctgactcgtgacggtaacccgaccgatgacattatctggaccgccggctcgctcgtcccctctgcgccaaaacactacggtctcacctcctttgcagctgcgctgaatgaaattacctcgattgaagataagcatttgcccgtcacggactcccgtctgcgtcctgatcagcgcgcgctggagaacggtgacctcgaccatgccgaggagcttaaggtacagcttgaggagggacagcgtgcgcgcaggcgcgatatggaggatgctggggagagttgggttccgcgctggtttacgcggattactgatgacactgacggggaggttgcttggcggctcaagagtgggaaagatgggtattgggaggagagggctaaggggagctggtctaatgttgtgcctgtgttcgagaatcaagagggttagactagatagttgttgatgttggtttgttctgttggttacattctattggacatgcaagaccaagaatataaaggagagatgaggcttcgcggtgttttgggcaggaccttcttcactctatatcacgataaatacggacttttctttctctggatgtatcattctcttgaacggcttactgagcgtgaggatacttgatgcgcagtgtcatttcgttgggtacaaagttaagagtatcgaatcacgaacaagaagtcaagtaaatatgaacagaaaacagaaagcaaaacatcaatgaagagaacattgaagctgagaataaatctcatgaaccgaggcttgtatgcgaaactgaaatcctccatgtgaaaaaccgtaagctgtcgtattcatcgataattgaaaaaccgaaaaacataactcctttttattcatggttccattgttagaccatcaccgatgcgagtatgcaaggtactcatttactcgtcgtcatcggattggggagcagtccagcgacgcgagttgcgcatcttggctgccttgcgtgcactttggcgatccaccgacccataattctgatttgccatgcgcatcatgacgggaaggctgttgagaacggaacggttaccctggaaatagtgttcggaaaagccgccctgcaggatgcggcgcagagcagtgagtcgtacccacttccaccagcggtcgatagtcatgactccatggcggccgatcttgacagtgagagtgctgccgtaatgacggttggtgttctggtcgatggcggtgttgtaacgaggaccgcggcctgggttctcgacagtggtgaggatcgaggcgaagttgctgtggagggacttcttgtcgcgcttgcttatctgcttgccgtggacggtggccaggttctgaagttggctctccagctcgggagtgttgtggtaagcgttgtatcttttcacgagcttgggaccggatgtggaatcgtgctcatgctcgtcgctgtcatcgtttgaatcagcgctctcctcgtcttcgtcatcctcttggggactgtagctcttctcatagagtagggcaatgttttcgcctgctgcaatttgcacgttggaatcagagctgtcgagctgatccatgaagatctggactgcttcctcgctttcttcttcaaaatcgtcgacttcggtggcgaggaatccccactgctggagcgcggcagtaacaatggtggggtcgtctgtggcatcgacggattggccatccgaggcgatgatgtccaggaggaaactcatctgttcaagaatgccatcttcaccggcacctccgaagatagtacacgccccaaggcagtgaatagctgctgccttgacaagaggggaagcagagtcacgaacggtacgggtgagcaaggactcggtgttttcgtaaacggtggtgtcgaaagctgagatgacaagcaactcgatagcgcgcaagccaagggttgcttcgcgcacactaatctcggtgcggacgcttcgctcaaatgcggccagtagttctggaacaacgccgtggatttcttctactgtgtagtggtatttggtcaggcggcagaatacttgcagggcctcctcgcggccttggacactgctgcgcttgcgatcaaggatttcttgaatacgctcgccgagttcgtgttcccaatcgggattatcttgttcggggttctcatcgtcgagagatccgatgctatcccgaattggttagtgccttgattgtaaaacttgccgacatcattggtgacatcatcccgccacgagagtgggaccatatgaagatacaaaaaaaaaaaaacagacgaaaagcgcaagaggaatactatcagcttacctcatagatgtttcgtcagagaggaatcccgagtcttcttcatctgaaggagctctgctggcattacgagagccctggcgcgaggtctgctttgaactggcgggggagttggtgcgggatgcttcacgggatgctgcctttcgtgagacagtcttgccgctctcgaagatctggcgacgtagatcgggcattttgataggatgataggggaaatcctcgaaatgggtacagttgggaacccagtgtgggaataagtagtaaaaaggatcaagccaagagacggttctctttttaacctatgggtactggacaatagtcgagaattagaagagaaagaagtaagtaattgtgcatgttctcaaagaattcgagtatactgaaagaagaggaagaggagagaagaagagaaaagaacaataataacaataggacgacctcgggactcgtgactgcgtatgtaagcctatcagatggcttcttttacattttgtctggcattccaccaatcagatatagattgggacaatattcctcttcctttgaaactattcatcgtcattgttcaatgtgctactagtccacttacggcagagtttttcatttccaaggttagggaaccatgacagcattggtatcagtatggaggattggacatggactttgacattacgccagctgagtattccctttgatctttctttgaggggtatcattatcatacatccgagaagttggagcctgttacagctgctgccgcaccaactcgaggatctgttgggccttggcgccctcgagatactcgcgaccttcctgtcgccattcatcttcctcgtcttcctcgtccccaatctccaagtccacctgcagactagcattgtaagcacctttgaccgtatcttcgtccacacgcactccgttttgcaccagaactcgaatacactgtgtcaaccgtgcaatctcccgacgggtctgtggcgggatatcgtcattctggctagagtagatggagctcgacaccatttcttccatgcgcgtaatagagacattttcagtagtcgatgatgcggcatcttcatcggaattcttggagataaatatgtacccattcaccccaaggacaatgttcacgttaccaccaccattggcagtggattccgtccacacctgtcgacgagaccgcaccacaccaccagtaccagaacctccaggagcagccaaagcgctgcctgaagccgaattcccaaccccaacgccgcccttgacgctagagctagacgctgcgctgcctccggttcctgtaacggcgaggaaaacaccgttgcgcagcttcccgtacttcaaagaccgtgtgtgtagtgacgccgacccatcctggtgcacgctctgcacttcggcaactacaagatcgccttcgctgaaaaatgttcggatctggagctcgtcggcgcttgttcgtcgacgcagaataccgccgggcagattgattgcggaaagagggagctgggcaagtagcggtgccgcgacgtcgaccttccaccgtcgtgattgcacttcgacaatgcggccaacgacgagatctccaatttcgggggtatagcgggcgcgcagagggtgaacagatagtagcttatttgtcttttgaactgtgccggcaacagtggcaattatagaggtcgagagcgggttcatataggtaccatgacctctgtagattgttagtgctgaaaaaaagaaaatgacgatatgagctccgcattttttttttttttgcgcagcattcaagatcagaccaacctcatccattgtggatcatctgtgaccacttctcctggtgtgacaatccctgtgccaatattcgaatttccttgtaaacggggtcgcttgtgaggccgagagataccagtcatttcgacatcctcctcggagtccatggacatggagtcatctgagtcagcttcgtagggacgggagtcctctaccacaggtgggagaatagtaattgccattgcacagtatgttgtctgtgatcgattgcggttgacttcaaaatgggagtggaggcattcagataggtagagaagaaaatccaggtcacgtgatagccccacactatagccaccaccatttacaagagaaaatactccgtacattagttagattagagctatctcaataccgcatgaagactacatttcatgtcactatatttcaaattaccaatgctaatgttccatcatatcatttaaagccagtgaatcaacccaacgccaatattaatacataaaatgaattccgtttatgaaatcaactgctcaagtctttttggccactttgcttgggttggaagtgggctcttccttcttcttttttgaccggctgctaccacccttgggtctataaccggtgtcctcctcacgcttgcgcttgttcttgggagtaggctgggcctctgtgccgtcctcatcatacatatcctcatctttgcgctgagctggagcccgcttggaagatcgattggaagggcgtgatgcagacttttcagaagcaacctcattatcctggagagtctgaggttggttacgacggagccaattgtataccgatgcgggattccgcatggaaagatcacgctcacgttccgcaaacgtgggacgttctggaatgcgtgcaagctgcgtggcagccgcctcatcacctagcttggcgtccaaggcaaggtagtactcagtctcacgctcgggcgtaaagtatccaagttggcgttcacaatcattgtcgggcttcttttgaacagcgtctggagtgatgtgatgagcccgtgacagggagctatactgctgggctggtgcaaacgctttatttcgtttgatgttgtcctcaatgatacgataagcacgcgtgtcaatgctaccagcagccagtccagctttggcctccttccatgcttgttttgccagtgtcgcatcgttgatcaaaggtacaatttcctgctcgggggttggtagcaagggaaggtcggtcggcatgctcagatcgaatcgcacatcaggagaaacatgtaggctttcgttgaactcgaggagaacctctagcaattgactagcacggaggaattagcaatagttcatacaggagagaatttgtaagtcccatactcgttttgctcttggatgcgcttggataggtcctctatgcgcaattcctcccggatcaaactctcattctctcgggttcctagctcgaacctgactttcagcttggcatatttcttcctggagaaaagagggtcagcattatccgatgggctgattgtgaggactcgtacttgaaagaccggactgattgcttaggaggcggtgcagtggctgcatttggcaaagttgcagtgaagcggttatcgttcggttctgccatggtgttatggggaagagaagtttagaagagccgggatgaaggggatgtggtcaccctgcgcgttcacgccaagaagcggatccggctgcgtgagaggcggggcctggccgccggcaaaaaaaaaaaaaaaannnnnnnnnnnnnnnnnnnnnnnnnnnnnnnnnnnnnnnnnnnnnnnnnnnnnnnnnnnnnnnnnnnnnnnnnnnnnnnnnnnnnnnnnnnnnnnnnnnnnnnnnnnnnnnnnnnnnnnnnnnnnnnnnnnnnnnnnnnnnnnnnnaaaaaaaaaaaagtaaaattattgttcggtttcctgtgaccagaaacaatctcaggcttctgatagattgactaatattatagtagtcatcacaccattttacacctttcacattatgtcggaactcaccgaagtcagtcaaaagaagcgcaagctgcaggacggtcctgagcttgaaatcgatgtctctgcacccgagccagtctcaaaaaaggcgctgcgcaaagcgaaaaagaacaaaggaggcgatgtgggtgatgaggagaaacccaagtccagcaaatctagcaaacccgagtctaaagaagctgaatcagacgggaagcggtccaaatatggtatctggattggaaacctatcgttttcagtgaccagtgaagagctgcgcatgttcttcaccgtcaacgctgatatctccgagtcaaatatcacccgaattcatctgcctaagggccccgaaagatttgggaggtcgcagaacaagggctttgcttatgttgacttcaccgacaagaagtctttgcaagaagcaattggcctaagcgaacagctcatgaccggccgccgcgtgcttatcaaagatgcaaacaattatgaaggtcgcccagacaaatccgaagcccaggcgaatgccgcgggtgcagccaagtctggccaccctccctccaagcgaatctttgtcggcaatctcagcttcgatgtgaccaaggaaaacctcgaggaaaacttcgccaaatgtgggactgttaacaacgtgcatatggcgactttccaagacacaggaaaatgcaaaggttatgcgtgggtggagtttgaagaactcgctgccgcagaagccgcggtgaggggattcatgttgatcaaggaggatgacgaggaagaggattcctctgacagtgattctgactcggcctctgagaagaagaagtcgaagaagctaaaaccccgcgtgcaacgggtttgggtgaaccagctcatgggtcgccgtatgcgaatggagtttgccgaagatgcgggtacacgatacaagaagcgctttggaaaggatgccgagaagaaggatgaacctgctatcaccgaagtcgatggcgaatcacgagaaagaccccgacacaagaagagacgtgaatccatcgatgagtctcgctactcgaaggaaaccgtccagaagctcagtggtgccattgtcgagggccaaggtcagaaaatcacgtttgactaagttattcatctgcttcgtggagtccaattatctgcggtctttctacaggaccattcaatcatctcatacacaaatgtcagtggaattctgatacctatcaatgatctgcccgcaatcgaggtggcattgggatcaaactccgaccgtggtctaccctgtgacttaagcgggatcctttggtcatagtttttgaatatttgtacgatctctccagatatccatggtcatcgagtccattcctcagtggcacagcttgcagtgaaatgcgcaagaaaatgtacgtatacttccggatatcacaacatccggcctgcatactagggcgcaacctcaaatttcccagaatacaagcaaagtttctcacataacaatattctatatcaaagccttctgtaactagttgtcaatatttagttcagacactaaccaaatcaagtaaacaattctaggcccaatcgtggcagaaacagcttcaccgcctggactaggcccgatcaggcctgacgtctctcgcgatgtcatgcccttcctctgaactcgaatctctctggacttctcatctctcttgggctgcatctcctttctcctttccccttgctctttctcttcttgctctttactttggttattcttcttgcacacggtttctttttgtttcttctagcctttcttagtactttggtcttgcttgatttcatttgctattccaccgatttatcgtccttcaacgtccgttgtctaccccggattccgtcctctaacctaatccggtcccggtaaccacccagtcaagcgtcaacggggaagacttaagccacccccaagtgattaatcccttgtgtctctaccatggctcctcttcgacgtcatatcggggccagccgcagaaagagacgggaggaagatggtgaagaagagagttcaatggctggtgacatgggagatgactcgttgagtgaaggctcgtgcgatagccaccaggaggacgaagatgcagacggagaagtcagtgaagagagcgaggacgaggtttcgttggataaggcgggcaaggtcaacggttgtggggtagacaaagctacacggaacagctctgcatcccccggaaaacgagtactcaagacaacagtttcggatacagaggcaatgctcaacggcctgaaggtctcagacggtgcgggcgacgctacggacgttcatttcgaagatctgaaggaacaaagggagcctcacgctggaagaacgccttccgcccctccaaccgaatcaagtcgaaacaatttagcttccagaaagcgccgcgagaatgacaagaatgtcaaggaacgagagcagaacccagccttcgtccccactcgcggcagctttttccttcatgacaagcgatccaccgacaacggtcaccgactcaagagcaagtctcgtccctacggcttgatcgtagatggtagctctcgcaggtatgttatattccattctatttccgactcctgtttcttactaacatgattcaggtcttctaagcccgatgccagtgggcagtgggcacacgatctccacgataccgtggctggcgaggatcgacccgcagcaaagcgcccaacaccatccgcgatgcctaatcctggcgcatccgtccccaccgccccgagatcttccccgcccaaccggtccttctctagcacaacgttggttgggaacgtacctgttgttgtttccttgcctggcatggccagcccaattcatttttcttccgtgcccaaaagactccacacccggctacctcagcatcgaccccctttgcgacgcgacaagccagtgcgaatctctcttcccagccagcctccccgatacatatttccctctgttgaacgttcgtttatcttcatcccccgcgcgttgcggccgaaccaagtctctcgtggtcgaggtcgtggtggcggctggtacggtggacgacgccctagctactatcccaactcatcttacacgccgagcattatcagccgtcgatcttcgtttggtatgccaccatctcaggatgggtggccctcacctgctgtgtctgtctactccagacctataatttccaacgactctaagcccgttgttcgtcttccccctccatctcgtccgcctgtcgggatcccaccatttgggcctgcgatggccatgtcccttcctcacccggcctatcgcgaaagccgccccgccccaatcccgatgcaccaacctcgtccccagaagaccgtttctgttgcggacattgaaagtccggcagctttcccgttcgctttcaacccgcctcagccccagcatgagcagcctttccaccatcaagtccctctcccagctcatggcccacccagccagccttcggccactccactttcccagatcccggagcgggcgattcatgcaccgccctttcaaccttacaattaccaccagcctagcttctaccctccgagttatccttcgggcggcatgtactacccgccttcggggcccgattacacgggttacaatggacctattggccccggagcttctgtgccaaacttcccgagccagcaagtgatgccgtatttagctggggagcagcctcctccaccaggtactgttgctcatgagtctggtggcaccgtctacttttacgatgccaatcatatttatggaggtcccgcaccaccaggatctgggcctgggggggtggttggcatgggtggaatgatgacaccgccaggcacgaccttctactaccctcaacaatccggtcaatattatgggcagtaatgaatgactttggcttttttttttccttttcttctctctcttattttatttttttcggatctcacaacatcttcaatttccaccaattctctctttgttctcaattctctctcccttttctttcaactctctctccaggatctacaggggccttgggctcactttgctttttctttcttatctgcatcctcacattctctagccaagttttgcccttttttcctcccctaatttttgtcctagtgtttgactcatttcggtcctggattttgatgcatttgagcgttttcccttgtctccaccactttccccctattgtacttggccttggagagaatcacgtcttgattctagcccttgtcagcccttccaaaaccccctcaatcccctcaactctcctccaatcgggcgatcgaattgccgttctgcattcacccatgcatgacatcatattttcgctggtttctatttgatgatcttgtatactccctttatagggtgttttgatgaagacgaaataaaacaaagccactactgccagtaattcgatccgtccacctgggcactaccacatatgtactccgtagactacgtagttctgacaagtcttggcattctcggcccggcgataaacacgtcacattcttatgtaatccatactgaaagcaagccaatccctcaccgcctgccctgtcagttcgcagcagctgaccgtctctccgcttttccccttcaattcgactgcttcttgtacaactcccctcttattttccttaactctcctctgcttcttctactttctccctcttcatcataacagatcatcattttatcttctggtattcctttcttactcgtaactcagtacaatcttccccctttcctttccatcatagtactgctgccttatctcagaggtgtatccaccctttgacattggcatcatctacgatgacaactccatctactacttctcatttcagtccagagaatctggttactgtcaaagtcctctacaatgacagtaaccgtcgcttcaagatgcctctcagggagctgaaggccgagatgttcccccagactgtaagtctccactcaagctccggatctgaagtccgacttatcttcaacgatcatcagattatatttgtatcgaaataatttgttccaaccctcatcagaaatagcgtgttgttttcaactgacttaatttttcgtctagcttaggaaactgctcggcgttccggcggatgtcaacgtcatccttgaacgctattccgacagtgctggctcttacgttcgcttggactgtgacaacatcgcagtctataaacagctctaccgggctgccaaggcaaagtctaagctccgtattaaggttactactcttccttccaaaaacacatccgccccaaccccagtaccatcagaacccactgtgccgatggagtcaaccaaccacactcgtcacagttatctcgaaacagtcctgagacctctaccacctcccgatacccttcctctcattgactcagcccaattcccttgttccaccggtgagaaagagtttcctctcggtcaacctcgctaccgcaactttgagatggaccaagaaaaacatcagttcccggtcatctcccacgcctcgtccaacgggatgttctgcattgactgcaatcactgtggccggtctattgcaaatgcgcattatcactgcagcatttgtgagaacggggactatgacttgtgtctacagtgtgtcggtgccggcgcatcttgccgcggtgaaggtcactggttgatcaagaggaccgtcaaggatggtgtcgtcacaaacagtaccaccgagactattcctccccgtgatcaatcaggactggatttcaaccccatgctgcctcggcagattcagcgtgaagtgatcactaagccggtggtccacatccctgagtcggtcactgagtcagtccctgagttgatccaagagtcgatcccagagccagcggccccgtcagcttgtttggatgcagccaccattcaaggtgatgacaagccaatgtgtaatggatgctgtcgtggtaagtcttctgtttctcgcctccctttctcttttctctttgctcacaacacacagaagtcgacgaaatcaatctcgtccgttgcaatgactgcgaggactatgatctttgccttcgctgcctgctccgaaataagcacgggcaccaccctggccataccttccacctcggatctgaccggaacttttgcttgaagaatttgatcacgtctcgctgccttcccggtcggcagttccgacactccgctgtctgtgacggctgtgacaaggtatttactcacacattccacttgcttaggaggttcgcggctaattttagctagcgcatcgttggtgttcgtcacaagtgcttggcctgccccgattgggacttctgtcccgattgcatcttgacttcttcgcagagccaccctggccatcggtttgtgcaagtttacgagactatcggtgagccagctcgtgagcacgaaattcactatggcatcttctgtgatggtccactgtgcaagagcaaacctgctcagagctacatcaacggagttcgctacaagtgcgctgtctgtgatgacaccgacttctgtgcgagctgcgaggccctcccgaccaaccaccataaccgcactcatccgctggtcaagttcaacaccccggtccgcaatgtgactgtgagcaccatgggcgacgacggctcaagtggagcagttgtcctaggtgaccagcctcgtgcccccacttgccccgttgagcaggtcgagattgcggagccggaacccgttgaggtggatgctagcacaactgtggagaaggatgagcctcagccattcgtggacgagccccttctcggaactgacagctctgatatgacggactacagggcgttctttatccgtgacactgtcactgacggtacaaagatggccccaaacaccacgtttcgccagacctggactctctacaaccccggtcctttagcatggcccgttggctgtgatgtgcgcttcgtcggtggagacaagatgttcaacgtcgatgtctgccacccgtctagcgtcgagtctattcgctcggccatggaaagcaccaagttggttgcccctgtggagccaggcgagaaggctgactttactgtcaaccttcgcactcctcaacacgaaggccctgctatctcctactggcgtctgaaactccctaacggtgtggccattggtcatcgtctgtggtgtgatctcgaggtagaaaccgcttctctggaaaaagctgagacccacgagacatactctggcgtatctgaaattgccagcagtggcatgatcttccccaagctagagaaggaatctccggagtcaagcacttaccaagccgaggctcctgccccgcaggcaccgagcttgtcgaattcttcggaagtggacgttttagaagacgttgagagcctgactttggacgataccttcactgacgccgacaccggcttcctgacggacgaagaatatgacgttcttgacgccagtgatcaggaatatattgaagccaagcaggccacaaactgaaaatgttcgaaggaaatcatcacgacacgatatgggaatgggaatttgcgcaactgcactcttttttacttctttttcttttcggactttgccgctgaggtctagtcactccgagcatgactagacttaatgagattgataatttttttttggcctacgaaaacaagcaaagaaaaaaaaagaaccacattttttgcctgagatagttcaatgcactttcgctgttttgaggatttggattgtgtagtacgctaaccctattaagcattgatataagcatcgacataagcatcgagtccttgcctcctccctacatgtatgcagtcaccaagtctccctgcgagctgccaagagttccaagtttctgccctcgcagagattcccgaactgaataacctcgggaattcagtgaggggtcgagaaatggctataaatttggactttgtccctattttcgctttatatccccagattcattcacattcgatacaatgggattaagcatcgtcggcctcggcctagtcgctctggtcgccttcttggctggtccaatcagccatttcgtgcagattgcaggggtcttcctcacgcctaatccgacagtactagctgcaggccagggcccaatctacatccaagacaccatccattgcgaggatgtgcattactaccgcccggcgaacctgctgttcactgcctgcgaggacgacaaaagcacgcggtttagctggttcccgccaattggccacttcctgccagtcacgacccaaggctctattcatgtcgtggatcccaaggtgactttgttcgaggcagattcggaccaaatatcaaaaattaaccccaaatatagactatgaaatcgactcgtctggcattcgagaacttccaaggcaccttcgtgacacatggaatcgatgtcatcgaggaccccgaggactcagacgccgtctacatttacgccgtcaaccacttgcccaacccggcatactttgaagccggcgagcccaaagacgtccccaaagcccagtcccagattgagctcttccatcacgtcctcaactccgattctgtccgacatgtgcgctcaatcagccatccgctcattaaaacccccaacgacatctacgcggtcagcccagtctccttctacgtcactaacgaccacttctaccgcgaggggcccctgcgactcttcgaagccgtctggcgctcagccaggtggtccaacatcatctccgtgcagatcgccgatctggcaagcaaagacgcacctgtcgaagcctccgtcgcactgacgggtctatggaacaacaacggtctcgggcacggccgcactgacgacgaagtcgtcattgctagcgctatgggtggcgagatcttcctcgcaacccggcatgagtccaatcactcactctccatcgatacctcgattgccttttctagttctctcgctgataacccgtcctattatgaagacccataccgcactgactcgcatgatgcgagcggcttcctcgccgccggtatctcgcaggccattcgctttttggggaatgctaaggatccgaatgccaaggatccgatccaggtgtggtatacgactctcaattcgcacactggggtctgggagaagaaggtgctgtttgaggatgatgggtctagggttcggactgcgagtgccgctgttttggtgcctattgagcctaaggctagtgaaagactagcttggctctttgttactgggttcatgtcggagagtatggtggctgtacaggttgagctgtagattagaattgtaaaacattacgcactcaaaaaaacaaagaatgttggttgttctttgccctgactttgtctatataaattccacttcctcccggattcaactattcctcttctatcttacactatatcaaaagctctatatatatttcatcaacttaccatctttccagctcttactttatatacatatttccacaagttccaacttatcactctactcgcgtacagaatcgttgttgagtcgagagaatttcagaagtatgtattttgtaagactgctatttctaccaaaaccaaccatcccagttcaaaccaagaagccaaacgaaacgccattgtaggccgtctcctctctatcaaccttgatcttgtcatctcctggtacgaaacacaacttcgagacctgcgatggggaagaaataggaatgcgcaaactcctagctcagccaaaagccttcctggtcttcacctctccaaatagccatgtcgtcgtcaaatccggccctgtgtggagtcttacatatatacaaggaatactatttattcaatatggggtatatctcccgcccatcctcgttgatctaagccgacagctgacatcttactatatagacaggaccaataatcaccagtcattatcagaggtctagatacaccggatcttgttgattcctagctcggatatggatgcagcaaggagggaattgcaacagcgtatcgacgaagatagtcgaggccctgctgaacgctgtgttgcgctcctctatgttcggtggatgatatccgcctacattgcatactgcgcgttgcctctgacgatcctgttgtctttagaaacctgcgactattttccctgcccgacccagccaattcctgccgccactgtaccaatagtcgcaggtttctaaagacaacaggatcgtctaaggccgcgcaagacacagtactatcagaagttctaagttctagcccggtatcaggtttaaaaccaaagcaactgcttggattgcttcttgatacgtcgattcagctttgattccaagtatattcgttattgtctcctcacatggaaaacagggccgcgatataattaggctcgagtaaacatagtggttgaaaatcccaacacctttagagacaaagttcaattgggttgacagaaagcatgtagatgtctgaaattgaagtgctagcgccgctgcaatgcaaattggaagaaaaagccaaggtaaataacaagatttaaaataacaccaagtagtacaccacattcatctcatcatttgatttctctgcttcatctgtctgacttgcccggagtctgggaagagaatgaacagtacttgtccttgatcgcgatgacctcgtaagttccctcatcagaggtcttgatggtcttgacgttttcgtatgaaatgtcgtgtttgatatcaagaatctccgacttctttcccttgcgggcattggagctccgaatgtatctgtggaatgttagcagactgtcatacagagcatagctagagactattgacttacgtgaattcgaatggtggtgtaccccagaactcaaagtgaagctcggcttctccaccctcgtgaatatccaccaccgattctttacccttgctgatccgcacgctcggcatagcgtggataaccttggtgatgtctttgtgggccttgcatttcccactggctccgtcactgacggcgttgatggtgaactggccgggaagttccgcaatacgacggaagttggtggtttgggtagtggccttgcgcttggcgccatcgaacgtgtagaacacatcaaatggagcatggcctgacagcgcgaatgaaagtcgttcgcccacacagtagtccatcttggactcgagcgggacaattgtaggaacgtcggagatggcgacccgcaccgaggaggcatcaagctcagtggtcctttgacatcctcgagaatcgcgaaccttgtggatgctgacttggtgttgccccaagtcaagatggcgacgaggaatcagcaatttatggcgattggaattaatcttggaaatcgtgacaatctccggtttggcgttcgagtggtgtttgatgttgatctccagcgtgaatggtgggacaccctctaaggtaatggggatggattcctcgccgttgatgtcttccttgcagaagccaaagacgtggccaggttggtcgaatttagcagacggtagcgggttgaccttttgtgtcacaaccagatcgttgctcttgggatcgtggtcgtagaggctgtcgccaacttgggtgaacttgtagctgtattctccagcctcggaggtatccatctccatcgaagtcacatgaagagcagacttcaaagcccgtggcttcgccgcagagaatcctccacggtccgtcttgcgtcgcttctcgtattgaacactgtatggaggattgcccgacagccgaacttcaaggctgtcatcgtcgccttgacagacctcggactttgcaaactctttagcggctccaatgggtgagccgtccagggcagtgatttcgggccgtggaatccacgagacctcaaattcctttgcagactggtccacggttccaggacaaccggcgtcaaatacttccatgatctcatacaagccctgcttgtcgacggccaagacactgttttcgtcccggaaggttttctgaacgggcgccgattccgcgtcaacattcttgtacttgacagtccaagggcgctcgccactcagcctcaatggaagctcaatcttggagccctgcaaagccaagacacttctcttcttgtcaatctgaccgaaagagacgtgcgggggctgcgagcgggcttcaatattgatgctgtccttgagagttcgtttgcaaccagagatatccttgacgctggtcagagacacggtgtagtcaccaccgctgaccagtttgtcagtcatgatggttgccacatcggtatcggattcgagtgtcttcctgaatcgcttcccattgtggacgatctcatattgcaagacccaaggggcctctccaaggaaagatacttccagagaaacagcctcaccgaaacaggcagttctcaatcttcttgataggaaatgagccgaagccggcggttttacatcttgttcaagcaccggaatgttgagagaccgtggcgagtagacggcatcttcgatgtctatgaatcgataggtgtatgagccggcttccgacggggtgaaatcaagctgcgtgcgcatgccatcgatggtttgtactttggaaacaacgcccttggagctctcaatgctgtatcggagagagaaaggaggcgatcccgtgaggtccaaatccacaagtagcccaatagcgttgttggcacagcggtcgaatatcttttcagctttgactgtcaattctggctcaggcgggttatgcaactggcaagatgaaggttcgaggatctctccaggacaaaacttggtagagattgatgtcaaggcatacaaaccaggctctttgatgtctaaagtctgattcatatgcttcagatcgacgatctgttcacgtgctgcttcttggttgttacccgtgaacgaataaccgaccgaaaagggaccatcgttagtatatgcgtgaccgtcgggatgaaagctcaaggggaacctcgtgctgtctcccttggccacttgcagcggattctcggaattgcacgtttgcagtgacaactgcgggcgctcgtgaacggagaattggtaccactgggattgcgactttgtggacggccgatctccttcatcaaagatggtagaataattggccacgtttccaatagcatcatggacctcttcgatggtgtaaaaccattctccgccatcgttcaacgattcatttaatggaacctcaatcttttgactctgtgcccacgaaacgtcgggctggttgatgctgtacagagcagccgtagttcttccattgagcagcggagagcgcagatgatcgggctggatgttgaggaccgagaagccacgatcgagattgttgacctggcgactgtatttgatcttcaacggaggtgtgccttccacctccagtttgaagtcggataattctcctttgcacttgtcgatgtgtgagtttttgatcaaggctcgcgggcaagagaccaccagcgcatcaaatgttcgcgtatgaacatcaagctgagactcgtccaccacccgttggagacgatagacacccgttttgcgcacagggaagagcaagtcgcggtggagttgacccggaacatgcttcttttctgcctgctttttaagagtcttcagctgcttcgctggaatgctaatggtttcattttcgccggtgttaaaatctagacgcaacacttcgataaggatcgggtcggtctggttgacacggatgggcaggtcgattgtggattgcagagaatcgaggcaaagcgagtttcgatccggattgagaacggcagatctattataatgtcagtatgatctgaggtgggtatattcgaacgggatagcttacccctccggcagaatgtgcacaatttgccttcccaggatcaatgacgcattgtgaatgatatcgccgggcttgaccctgcgctcagaaacggataattcgcgatcgtatgccacctttactagtccagtaaaccatgcagcccaaggaatctgcaggcattagcgcggatcgacagtttaaaaaaagaagaaaaaactcactgggatgcggaacatcaaaaagacattgcccacagcatgaagaaggaatagagtgagcgtagtcgggaatgcccactccagccaaggtatacgcagagcctgcagcccaaccaagaagattccatcgatcgtggcccatttcaacaacaaccaggttgagtcgaggtcatcggacgcagtcaaggactcgtaaatccgccacgcattcaaggcaaaatatattgcaacgacatagagtcgttgagatggagcatcaatcaaattggtgggaatcagtggcacatcggtgttcgcgttcgggggtggtggtcttgacgccctcgaggccgatttggatggtgatctgagtggcgttcgcccagcccgggtctctcgtggctgcgatcgcgaaggagtctcaaaaagttttctccttccagttccagggattgttttaggtgtctgcggaaaggcagatgggaggaggggagtgccgttcatggcatgctgtggttgccggagctggcgaaagatgggggatgtagtgagagtgcgatgctggcccttctagagctgtaagaagttctaaatgaagtccaaggaaggtgtttggagctgtccagtggtaattcgtgcctatagcagatggaaaaagaaacaaaaaagttggagacgcgggaagcgcgtcgggagaagctcggcccactcaacgacatgacctaaccgcttctccctgtccctgtattgtcttctattgccgacgtctggtgtctagttctataaaagatctcatatttttcaagatttgatacctggctccctttctgttcccctcagtgggaagagcaaacttactatcatctcaggactccttttatcatagcttcctctcatttcaatctcatcttgaagctctaaagctctacagctctacagctactacttttgaaaagaaccgaaatgggtcctcgagttaaaaggcgccgcctgatggactcagacgatctcagtgatgatatctgccagcctgcgtcccgtctggaaaaagacagctggaatgggttttgtgaaatcgaatcagaaccggtatgtttaactgacagtggccttagcggttctttgcttacggaattaggccttatttaatgtgatgctacgtgaattccaagtcaagggtgtaaaagtccaagaagtcgtttctctcgacgaagaaatgatggcatttcttaagtatgttacttgcagtccctctctatgctcttacatatagactcgatggctgactatgagcagtaagcctgtttacggcttgatttttcttttccgctggcgtgaagataacgatggaaagcaggaagcgacttgccctgacgggctgtggtttgcaaaccaggtcagtcccctattctttggctgaatggtcctttactgattctttatagaccgccgacaattcctgtgccagcgtagcactactaaacattgtcaacaacatcccagatattgatctaggagagaatctacggtctttcaaggaattcactatgcctttcaccccagcgttgcgtggggatgcaatcaacaactttaaatttgtgaaaaggatacacaactcatttgcacggtaagcccattggcagcttcttgaccacccagatactaatttgatattagaaaaatggacattctcaattcagatttacacctcaagactgaagctaccactaggaaaaagggatccaggggccaaagtgctgatgaatccgacgccaccttccatttcattgcctttatgcctgtgatgggccaactgtggaagtttgatggcctggagcgacagccacaagcacttggtatgcactcttacaaactagttgggatgacactgctgactttagtaggggaatgttccgaggacgactggctggaactggtccgacccaatcttcaggaccgaatggctgcatacgaagaagaagaaattgaattctcgattttgggactcgtgcgagaccctctgactgatctcatcaacgacctggctgtcaacgtgagaactttggaaattctcaacgagcgtgcctcatccctatgctcattatcagatacgctcgatttgcatgaatctgatgaaactgtacttggccctgacccttccctatctctgacacgcgaagagattgatgtggcagtgatcccccaggaagcactggatgattaccagacgtgctccgatgagaaattgcacgagtatcggcagaagataagcaggaggcagcgagaactccgtctacgcattcgcgaagagcagctatctcaccggtcggattatgactacgcagccggacggcggtttgactatgggctagcgatacggacgtggctccgactcttggcacagaaagaacagctgcaggagatgtcgacccccgtggcctattgattggatgatatctgctatccctctccttttctatctcagacgtgcttatcaggggacgtagtgatgtgacctccgtttccccctcaattgatttggcgtcgagtacttcctccatgtcgatcatcctagaaatacgcaatatataccagaaatctaagaaccataacaacagtcaacgtcaaaatataaaagccctggaaagtgacgcctcaggtaccccaccgggcaaaaaatagttcaaacgtcaccgcctcgaatgttgttgagcttctcttttccaacctcctttttggatgatgaacttttgattttggcgtggaagtcttcggaaacttgaaccatcctattatccttgtttcggaatagaggcagggcccgagagatcccctctctccaatttgccaccctttctattctactccccatctacctcaccctctctctttctctttctctacaattcctcgcttgaacatacaccatgtctgctgtcgcagtgcctgaaaaggcaccagatgactcctccaagctgaagaccttcctctccatccttcgaaagtaggcaacccttccttggcccccgctccgctccgctgcgctgatatagccagatctcagacactaatatgatcgggaattaggttcgtcggtgtcgcagatatcgcttcagttcgcttttcactcccggcacaactgctggagccgcgaccaaacctgggtaggtcattgttcgtgttacgctgtgcggggtcagtgctgactgtggatggctacaagaatactggcattatctagatcgaccggagacatttgcgaggtcaggaaatatgcccatatttggcggacgcttgtgtgctgaccaggagctacagcattggcaaatcggatgatgagctaggtcggatgttggaggtgttgcggttctggttcactaaggatctggtatgtttcggctgctcggattcacttgactacttgctgattgtgctacagaaatacgtcaaagggaaaccctgcaaaccatacaactcaaccctgggggaattcttccgagtgagtcccagtttcttcggcatttcaatcacggcaatccattgctaacaccctttagtgcagctgggacgttagcgacaatatccccgaagaaacaaatcttcccggtaccaaaggaatcaccaatggctcctccaccgtaaccgacggcgacgagaaagtcaaagtatgctacctcacagaacagacctcccaccaccccccagtctcagcattctatatcgactgccccgaacgaggcgtctcagcgcgcggatttgaccaactcagcgccaagttcaccggtactagtatccgggtgagcccgggacagcacaacctcggaatcttcgtgagcatcgaaaagagaaacaacgaggaataccagttgacccacccaaatgcccacctcggaggattactgcgcggagcgctttcagtcacggtcgccgacacatgctacgtcacctgccccaaaacgggcctgaaggcgatcctgcagtacttggaagagggctggattggccggtcacagaacaagctcgagggcgtaattttccgctacaaccgggacaatgatacgatcaatcgactgaaagatgtaccagagagtgacattgtcgctcgtatcaccggctcctggcatggaaagatattcttcactccggcgggcaccaaggagccccgtctgctcatcgacataaccccgcttaatcccgttccaaagaccctgcctccatccgaacaacagctgtccaacgagtcattgaagttctggtcgggtgtgacgaacgctattgtcgagaagcagttcaaccaggctaccaagctcaagcaggatatcgaggaacggcaacggcagcgggctgcggagcgccttgagaagggtactgaatggcgcccccggttcttcactggcgccgtgacgccgttgggtaagccggagctcacagaggaagggcaaaaggttttggagggaattcgctcgggcaacttcgctttgacggaaagtacagagcagggcgcatagatctcattgtgtttcccttgtgtaagcaacgttggcgtatctggcatgcgaccatacaaccatcgaacacggcgtctctttgttttactcccttttgatctcttttctggttatacttttattctcacatagaccttattctttagaaatctgttttggattacaaaattgaaatagtatatcatacataggttcaaatagaacgattaattctattcataaaaagaatcacaaccgttggtccatgctaacgccgccagactccaatcatcaagtacgtcaacacataatccatttcagatcccgagctcagtctcaggctgcggcactaactaccttgaaccctgtactgacggtcttggtaatctcctcattcttatgcggcagaagagacagggcatacgcaacatcgttccactgtcgctctgtttcgcaacgaggaagtcgagcggccagcttgtcggccagctggcgagcgtgtttttcctaggctaacattagcatagatcattataaacgaagaagagagagaaaaacgtaccttctcgacaaaaccgatcaagaacttgacgatacggcggagggatgcttcatctagattgcgctctgcactcagcagactgaacatgtcaacaaagtggttgtagacggcattgtccttggttgcaagttccgtgaagaacatgcgagccagatccgcgatcttcttgtcatcatcctctagacatttcgccatctcgcctagttgtcccttcaccttgacttgcccagccaagatgaggaaggtaagggtcatgagacaggtgcgcttgacagagtcatcgtcatcattcaaacgacggtagaggaaatctgtgttctcgtcgatgaggtggttgaagcaaacggccatgtcgcctagtgcaatgacagcattgctacggacgataggatcttcggaccgctccatgatagtgatcaggagtggcaggttcttctcacagtactcggcagatacacacatgagtttggcaaggcagagcgtcgcagaggcctgcaagtcacgatccgggtaggagttattgttggccaaaatctccactacaagcgggccaaatttagccaagagggaattctctccatagagtagctcgcgttctcggatatgggccatggcttcctggaagtcgtcttctgttgttccgccgataagatcaagttcgtctgcttcggcattgtcttgttcatggggagcagtggctgctttgttcttctcttgttcgactttgcggcgtttgaagtcaagctcacacagctctagatgcacgatctgtttgattgcgacgtgaccgacaacgtacagcaactgtgagagtgcagcggatgctggcttaggcttggattcctggccatcgacggatgcagtctcaggccgttgttgctcctcgtctccgctgatagaggcatcggaggaaggtggacgctgttgtaggtgtggcgcaaagacgaatctcgtctttcgtcgtaggatatcagagcaaataacgtcaggatgcttggacaaagtgtaaatagcgttgagggcatgctctgccactccataccattccttgctggctgtttcgatctcaagcatggctaccaacttgaccaaaaccgagtggtcgctagcgagtttgggaatcccaacaacctcctttgatttggcttgacgcccggggatcatgcgccgcaaagcaatacaagtgtacttggcgagcacaaggtcagcccttcctaagccacctagaccaattcgcagcatggcctcgatctcttttaccacaatctctggatctgccagagcaagcattccgagaacaatgatcgaaccccggcgctgagtccgtgagatttccttcttctggatactgtagacttgccatagcttggcaatcactgcgtcagatacgtttccagccttcatcatcgtgctgagcaactgctcgagacaggtaagttcggcaggagttgcaccaaacgtcaaactgatcatgttgcgggcgatgtagtttgcagcatcgttgggtgtgaaagagcctggtgcatcgaagaaaagagccttgtaacaatcaataagatgtgtctggacgccctttccttcatcgctgttgcccttggtccaaatcaggcgcagcatgcggcgaattccactacgggcagtctcaactttgtatgcatcgagaacaacaaagaaatccatggcttcaataacctcactcttgttccgggatgcgagtaactgtgtcacgataatggacccggaatgaagcacttcaataaaccggattgcctcgttgtaatacttcctcgtcagttggaggcgtgtcatcaattcagaggtggccgcctgttctgcggctttctgcacagcaacagccttctgttcatcactcatccggggcgcttttgacggggaatcatccgggatctgtgtagcgtcatccaacaattcgggatcaacctgagtcatgtcgcctgccccaaagccgggcgtttcagcaggacgcagggaattcaactcggcgtcaaccgcgtccattctatcagtccactcctttaatgagaggagcccgccatgcataacactgaaaggatgtgtggaaacaagcttggacagcagtttgatcgcgttgcgtcgcacattgctgctcttatcctccaagcttctagcggcgagttccgctgcagcctgtcgccttttcgggaacttctgctccagatcgcaaatccgcatgaatacctggatcgcgcgacaccggcagtaagggttgatatcaaggaacctttcttctaatacgtcgaaaaaggcgttgatctgggtcttataattatcactgcgttcttcctgccgactgagatcggaaatgaggtttccacagacctcaatcactgcacagcgaagagtatatgcctgtacctgttagtggagctttgggcaaattaagagtatcactcacgtcactatctagctgtttagccagaagggtcatttgcttgatgatcaatcttggcgcaagttcggacagtttgataatgaatgtcgatacagacttggggcctctcgtatcattagaattaaactccttatttccgagctccctacatgtaaagttagcaactatccggtcggtttgctgatataatctcactttaggatctcgtcggaaagctgtggatagtcgtattgttctgctagaatatgcaggaattcggccatgggttcagacagatgttcgaagtaagtcaagctttgcacaatcgaagtttgagctcctatgctagagtcagctatcgctcagccggaatatgcatcaggacacctaccaaaggcctggccatggtgcttgactgcaatgcaaagaaccttgaaagcatgcatgcgaatggccatgctcttcacccgctgctcgctctcgaggaccagatagattgtgcgcgtgaatagggtaataaaagtgtcacgatccgaagtggtcaaaaaaatgcgtcctagcttgagcttcatcaccttgcacatcgtctccatggatatttgaatctggggcgtccaatcccactggccgctattggcggatttcttagatttgggtcctcctcgtcgaacgggtgctgcctcggtgggcttctctgcagccttgacctctacggcagacaaagcccactggagaaggaacccgtacatctccaaaagctgcttatggtgttgaataacatcctgctcgtcggattcaaggtctccgtggatgacgtctgcctcaacagacaggccagaaacaaccaaatccaaaagtttgctcaagtgctttgcaggaagtagggtcgcgtatctgcaagagtgaaaaggatcgtcagattcgagtccaagcgggcgccagcctccatgggcaagttgggaagggaccggggcgcactttagtagaaattgcagcgagtcaaataacgatgctcgtgttaatgcctcggggttctctgccacagcgtccacgatcgggttcaagatactgtcaatcagcgctggcgaaagttgatccggatccgattcgcaatccaacagttccgggtccgcatcaggagtcgggatcgaagcgggatcactcaagtagtacttgagcgactcatttatgttgaactcgattctgtcctccattgtggtgtcaaatgagaaaaagaggtgaaagcggggaggaaagccgatttgttgataagccccgttgtttggcttttgcctgtttgggtgcagcttatgtcatcatgttgtattttaccgctaatgctgtgccagacccctctcatgtgttaccgcaccgccttgtattgattgatttggctaccagtcgtattgtcatatttgtcacgcgtggtaatgccaacctaggttgttgtgtttgcattcttatctcggcagttgcgatagaacattgaaagaacttgactttgaagcaacacgcgacacgatcttatgactttgtttctccactttgtactcagcacattgaattcgaagactcctcattgttctccgtgccaccatgtcggccatacgcgctgctcctggtgtatttgagctgaagcgcaacaagtcccgtcatgagccacaattgcaacacaaatactcgctgggacacgacgatgaaccggtctcgccaagcgatgcaccccaggagagtgaatatgaggaagaggtggaggattcggtcagagaggatatgagaaagcttgaagacacattcccaggaatctcggatcgcttccgtctggtgaataggatcggagaaggtaggacttgaccggttccccgtcattggcgggcttctttattgacaagcccaataggtacattctccacggtttataaagcagaggaccttcattatgatgcacaccaaaatgactgggatgtttcaacaccaacacaagacaactatgcggagcctccatccaaacgacggcgattcggaagggagccaaccggacgaaaaaaaacgaaattcgtcgcattgaagaagatctatgtgacgagtagcccgctgcggattcagaacgagctagaactgctgcacgatctccgaggatgcgggtctgtctgcccgctgatcactgctttccgataccaggaccaagtggttgctgtgttgccctatttcccccataccgactttcgcattcaataccgcacattcatggttgcagacatgcgccattatctacgatccctcctgaccgcattgaactcggtacatgaacatgaaatccttcaccgtgatatcaagccgacgtaagtttcattcttcgacggcctgaattatgctaatatcttgaagcaactttctctacaatccggacctgaaagaaggcgttctggttgacttcgggcttgcggaggtatgattattgaccgccatatgttgatgcgtttactgattgtccccacagcgccaaggctccgaatacaccaacccatgtctatgtactcatcaaagctacgtccgtcgaagccggatcctttcaagttactactccaagaaccccccatccacggggttttcagccggctaccctaagaatgattcacggccatcacgacgagcgaatcgcgctggaactcgaggctttcgtgccccagaagttctccttaaatgcacgtcacagaccacaaagattgacatgtggtcagtgggtgtcattcttttgactctgctgggacgtcggttccccttcttcaactctgccgacgatatcgatgcgatgatcgaaatgtcgagcatcttcggtaccaaacgcatgaagactgctgcggccatgcatggtcaaatttttgaaacaaacatccccaccatcggcgagaaaggctacagctgggagaagctggtgaaatggtccagctgtgtagaagatttgacggaaagcgagcagcaagcaacacgcctcttgtctggactgatggaactggaaccgtctaagcgcctcagtgccgcggatgccctggagcatgaattcttcacggatcccgttcaccatgatgtgccatggggaggtaacccagaagaaagcgcagaatcaggagaggaggaggaggcagatgatgcagacgaggttgccatgctatgagacccaagattatttgtacgatatgtgagatcagttttacgccatacactgcataccactttattcagggcaatgaagcagccttcatatgaacaatcccgctgtatgcctatctatccggtatgcaatcttttctagctcgcttctccgaaatcgtagtgcccggtctccgcggcatgcttcgtagcacctttctctccggtgaatttgcctccacagacgttacagcgaacagtgaatccagaagtgtccgtgtagtagtgcttgctttgcaacacctggcatagttctttagccctttgcaagacaaccggatcaacagcctcaaagatctttgtgtcatcatgcgccagtggattggcacgagtgtagggtgggtgagaaggggacagcgcaaggacatcgtaatgaatccccgaatagaccacaatacaccgtgttggtgctccctcattaaactggaacatgtgcaaagtctgtacatcgatggagcatatctcgatattgaagtattcgctgagaatcttgagttcgatggcaccaccccacgagtcctcgttctggatccaggtacagtattcgtcaggttttttgcctaaaatcgctgcagtatattcggacgggttggattgaatagctcctgcgacgatcgatcgtagctcaaccatcgtatccatgtcgcccatgactgcagagcccactgctcggaaaaggcacgagttgtcgtcgggcatcacccggagaacgaacgttccggcatgctctggagaggcaatttctggtgggtcttcagcggtgttctctggtcgtctttgcgacaatgatggctgcgacggctgtgatggttgtggtggcgctgttcgggctatgggcgcatcatcgctcacgccccggctggccccctctttctgtgcgacgatgagtgactccccatttagatttatcccaacttctaatatcctttggtctggttggaagctgtcaagctcaagtggtttgagagggtatccgtatttgacgtcaaaggcagcaaggccggtcttctccgctatttgggtttggagatcttcgatggttgcagtgtcatccaaggtgacagttgattggcctgaaggcccacggactcggattctcattgtgatgaagtcccaaagaggccaagacctaagggaactgtgaggtatgttgtagataatcttaagaacggaggttccactgatagggagatatgacgacttccgtgtggggtagttatacctgggtacggagtataccaaggcagtctggaatgcaagccaaatggtatgggccctaagaagagatggactgatatgtaaatcagtagtctgttcaaatctaaaacagtgaagtcgcaaaagactgtaagtaaggggagactacccaccaaactaatcattgcatgcatgtagccaagagctgcatacatattgtacattgaaagtacgctgaggcgtgataacttcaattccagtcacagcagacagttgtagcaaagatcctcatagaagagacgtgaatagagacatgattgagcccaaatacagcctcttttaatgaaaagatcatgaaaggtgaggccatcgtcatggaatgtcacgtgaaatgtcatggattaccgtaatgtgaaatggccgctgagtcagcaatagcttcacctgtccactggacgcgttggtgaaacatcctccgacatctacagggtcccctattgtcttatctgaattcgagcttgcttcatttgatttagtctaaaagattgctaaatttacccttgcgtggaaacgcgcgtgtcgccaacgacatggagtccgaaaaagagctatcgcaacccccgcgcgagcaacccgtcaactccatcgagaatgacggtgcgatcacgcgcgaaacttggaaaatcatgatggatgtggtcctggcaatttatgactaccgagaagaggagtgcgactgactttatatgagatatatagcgatcgctggctaattgttatcttgcgcagtggtcatgacccgtcacgattgttccatcgcagtgtcaacaagcgctatgttcccgactactatgagataatcaaggagccgatggccctgagtattttgaaagcgcgcatcaacaaacgtgaatacaagcacttttccgaatttgtccgcgattgcgccttggtgagtggttgcgccctccagatttgcaactagctaacgatatagatcccacacaatgcgcagacatacaacagacccaaatcacaggcctatgaagatgctctagttgtcaaagtatgtctgagtaaagccggtcaccctgggcattcaactgacagtttccaggaagttttcgccgccgagttcaaaaaactggccgcccaaggcctgatccccgccgacgaggcagagctacccgatcttggagagatcccagaggccgatccgctgccggatgatgaggaggaagaggaggaggaggaagaagatgaggatgacgactctgaggatgagggccgacgaagaaagaagcccggtcccaagcccggattcaagcgtggactgactcaaaagcacgaacccgatcttcgcaagaaacgaggccgtcctccccgcgtggacacacctatggaaatccgcatcaaaacaattctgaagggaattaggaagttcaagggagccggtggccacctgaagatcacacactttgaacgcctgcccgacaaatccgcttatccggactactacctggagaccaaggaacccatcgccatcgatattatcaagcgcaagtccaagcgcaagaagtacaactccgtcgatcatttcatgcgggaccttgacctcatgttcgaaaatgccaaggcgtacaaccagtcggacagtcagatcttcaaggatgcggttgatctgcaaaccgagtcacgaaagttggccgaacaagaaaagaagaagcctgatagcgagttcttgatggaagacggacgcttcccactccctgatggtattctccaccgcggtgaactgtggaaggttggcgactgggttcatatccaaaaccaaaatgatgtgaccaagcccatcgttgcacagatctaccgaacctggcaggactccgatggggagaagtggatcaacgcatgttggtactaccgtcctgagcagaccgtgcatcacgtcgacaagcacttctaccccaacgaggttgtgaagactgggcaataccgagaccaccggattgatgagattgtggatcgctgctttgttatgttcttcacccgctacagccgtggtcgcccaagagatcttgcaccggataaggaaatttacgtgtgtgaggctcgctacaacgaggagaaacacaagttgaacaagatcaagacatgggccagctgtctaccagatgaagtgcgagagaaagactatgagatggatctctttgatgtgccgcgcaagatcaagaaaattcccagtccgatcaaacatcttctcagagaggatgccaaggagaccgatgaccttcctcggccaacctggggaaccgacaatgccccccctcttgccggagctgttcaccgccgtccacgagatgagaatgtaagtctttttccccccacatgagaaaagatcctgaaagctgacagcattaggaatcaccaccacccgagccaactccatccccgcctcctccttccttgccccagtctgtagtacctcgtcaatcactgggcctgggccaatcactttccagaacagccatgagcccaggcactgctggactccaaacacgtactccagcacccccaatcatcatacacactactcccgcccccattcgcccaccgggcttccatcaaatgaccccatcccaagcctttacggcgtccctccagcgccgcgcaagcaaccttgctaccccgcaaaccccagcaggcgcataccagccctcaccatcggcccagcaaacccccgccaccggctactctcaaagccgcatgcaagccccaccagccgtgtacaaccccaacgcaccgcggcccattgaggtctttcacctgagcgacacagccaacgctgccatcccagaagacatccgcgaccaattccactgcgacgaccaagggcacgtgctcttcttctccacaccgccggtggattttatcccgccctcgaagaagaagctcggccattccctcaaatacctcgctactaaggaggagcatcagaggaaggtcgcagagcggaaacgcaagctggctgacgagaagatggaacgtgatgaggctgcgaagcgccagcgcgctgaggtggagactgcgcttgcggcccgtgccgaggcgcttaccggtaaggcgcttgagaccttggtgcagcacgtcgttgcgggtacggatcagctctatgaatctctccattaagcatggatgatgctatggaccttgatggaacgtgcgagcgtggttctgcgaggaatcgccaggctatgggacagtctgcggagaatggtttggtcaatttggaaggtactgctttgtacctgcacaaggcttacggagaaaaggcgaacatactggcgtggcttggcgtaatcttcggaggcattctgttttagtttaagatgtgtatgattaggtatcaaatgaaatgattattatgtatgttactcctgttagttctaactagccataccaacctactccttttacgaagactagtatcaaggaattgtttatttgcacatctccagtttgtacatgcctgcagtcctgagaatcaaaaccacatattccgacagtaggggacaaaaaacaagggagaagaagacaaagcaagcacctagtaagccccagagatcgcagtggtcgtggaatcatgaaacaaaagcagagatagtaaaagaggcgagatatgtcaacccaggtacagtgcaatatccatgaatggaaacgaataaaaaacagagaaaaggcagagattaatacagtaaatggctggttagagagatcctctgaaggcccagcaacgagaaacacatatgactggtctaaatgattccaaatgatggaataaaacaaggcagatgatgctgagtgccagtttatgatgagagggatgtgaagtttttttttttgtgccttttgtttttgccgaatcagatatctcacttgaggagaaaaggatgtattgtcttcgaaccttcttttgttttgtctctttgatgtatgttgcccaattgaactccgatgccctttttcctgtgtttttggtgagtatgaacatgtcccaatgttggacttggacttgacatgtcgtgatgaaattgattgaaaacaaacgacagattaggaggaactttctttgttctcagtccacgaggcactggtccgcttgtggccgacctcttcctccatgtcgaagaccaggtcactctgctcttcctcctcaatcttgcctgtgttgacaggaggggagatgattcggtcaaatcggccgataggagtaggaccgataggggtaggattgctgagactgctaggaatggcaggcgacggacgagcagaaccagggtgaaggcccatgccgctgagctgctcggagataatggacattgaggattgacgtccagggctcgagatgaacgacgcttcgtgggatacccggctactaccaatgggtcccaggctagggctggtgattgggttcagtgatgactcacggagaggagagccgatgtggaaagaggaagagccgtgagattcctcttccttgcgctggcgctgcttagcaaacaatgcaccaaagcgagacgggctcgacgccaggggagaaccattcttggaaaagctggtgctggtcatgccaaggccagtgaggtcgcggtggctggagctgaggtcgttatcggtccgggagaggcggcgcagcttttcctgtggagtcagaacatcgtcgtgcagattgaatggtaggtaatcctcttccatggggaagttctcatcccattcctcaagggccgtgggacgaggaacactagcggaaaacatgcgtggcctgacggggcgcgacgagtgcatgaaccgggtaccgactgtatcttcaggggcgggaggagaagatcctatgttcgatgaaggcttgcgcaaactggtgccatagccgagatcgcccaggttccggaatatatctgcatgagccggtctctggggtggtggcgattccaatccaaattgcgagggcatggaagcagccaccggaccgtaacgggcagcatgagagataccttgactgtcgaaggaagccgggagccctgcatcgagggcgctgaggtggttgttattaggcgacatgaggtatcggacatcttcagcgggagatccatacttggagccggcatcggatgccaggcccgtatcgatcgtggggattccatcataggacggctgttgctgcccatgcagggattcatactcctcctgtggggccagctgagcatatcgaggctgctcgtgaccgttcatgcgctgttgggagagcaccgagttggttaaggcggagtcctggttgacataggcctgcggattcacccggccgcccagattgagatgaccgcttcctattcccatgttcccagtcggccggttgactctccgtccatctggtaggatatgcgccagtgcgcattttgcgccgaatttgcagtttccctaaaatcattgccccgttagcttccgatggcctcggataacacgccatgagaggaggacttcgaaacagttccgatttcatacctttgcaaaatacttgcacggagcgtaatcaatgccggcatcggtggagtgtaaaaacggacaggcgggacctgcctggcaggcaccctggcggaaaaatttgcaaggaacatgtttggtgtctgtatatatgatagcagagggttagtttcgcattcgggcgtcgctacaataatatgaatgaatcaagtcaagacttactcttattgctctggttcggcgggctgcgggcaacgtcaagtgccgatggattgcgagaatgtccgttctgggggttctggggtgccccagaggtagccggaagaggcgcacgacctctcatctctgaatgattggctcgacgagatggcggagcacgagaagacacctgcatagagacgtaggaggggttggagattgaagaggggaaagagagataggcccaggcggtggagacggcggggagatcaaataatagatggttcacgacaatacgaagaactgtgaagaagtgaagttaacgcggcgtattattagaataataataacatcattatgttatacgatctcaccacagccttgtctcatatgataatgttcatctgattacggttcgcctcatcccgcgttgcctccattccataccggcgaatcagatctcccatcggaaatagaatacacaccttaaaacctctagaatccccccggtagctctcacactaaacgtgtgcatgagtgtcaaatgatgtgactcgggtggggactaggtagagagatcaccactccgcgatgacctcttattggagcgttccttcaagccccaaagattcctgataacatttgtcagaattccagagcatggacgattggagagctttgaggctatgtcactcgtcattcgcaaaaacttacccagagctccgccgcagtcatgtcctccggaagtacctcagagcattggtcccagagatcgcgacagatccgacggcgcaggttggcatgtcgttgccaatatttccattctttttcgagtttttctcttttttctggtgatatttgaacggggtcgccctcgtgacgacttgccaagcgagcttggatcgtcgattcctcgctctcaagacggctgatgtcctgccggagttcggatattcggggctttgcgtgcagggctgctaacgctgctcgggccttcttttcgtttgcctgtacagttgaaatctcgtcttcgagcctttcaatatcacgctggagagctgcagctatctctggggttgtgatatccgagggatcttgcagagcatggtaaactgtctgtttgcctatacgtcacttggttagtatgtctttctgttcaagtatgtcagacttaccagaagctctcccttcgatctcgttcttctcgtgcaagtcccgaagaagctttgcggcttgcgctagaagcccatatattaggaaagcatagacacggtcatagaaccagtcttacttttggtcaccttgttgtggagatttgcagagacatcaatggcctagaaaatgcttggtcaactctctgttcctcaggctgtcatgaagagagagcgaaccgagtatggacgactgagccaggcgatgttagtcactatctcgagtatcaaacaacttattggagctaacatacttttgttggcctgaaaatccacccggtaagtcattgtgagcaaacatctgtcaaggtccagattctgtccagatactcacgaaggtattctcggatcattgaagcatctttgcagtcaaggtcagcaggtcaacaaggatttgatcaagagaatttctcaccattatctgcagatgcatctgtcttgggcttacgtggaaccatggtgtgatgattaggaagatgtttgagattgggaagatgtttgaatgtactgggttggtacgagttggagttcacaccggtggacctcacgtgtgtgaagtgactacagtgacactacaattcgaagactgaactttcaatgacaataaattcacagtaaattcacaactactcctaattcatgcccaaacttacaacccgaatgataatatgtccagggaaaagaaacaaaaaagcttaaggcagatatgaaatgggtgcaaatgcagtcatgtggaaacaagaagccattgagaccattcgcctcccggacggcgaatactttttgaacccccgagattatagaaagtagagaaaatgcaagtggaagggagacagccaaacgtgcttggatagggaacagagcccggggtatcacatcacaatctgcaaaagtcagctttgagtcaagttcaatggctaaaaagtagggtttacatacgcaatcactgtctttcgccgcactaggaacacccatctcttcaaaggtcttgggtcccttgcttggtggcttggcgggcttcggctggggcgcggatgaagtcgacgatgcgactgagggggcgaccgagggcgcgatcgaggacgcgatcgagggcgtcggttgaggcgtggaggcacccgaaccgtgagaagatggccgagactccatacgtggaggaaacgagggcgaaccaggcggacgaggagataccagaccgggtgaggacattccggagtggccagcagtaggaggtctcataggcttgcgttcagccgagtcaagtcgaggtggtgggcgtcgcccacctggaggcggcattggtgcagaataaccaatatcgagacgaggagccccaccaggactgaccatgttactagcctgtgggcttgtaggtccaggaggagcgctgagaggtgctccagggacaggttggcggtagttcatgggcccgttaggtccataggacggattgtgagatctagaggggccttgggcaggtgggccaccatatcccgagggtgcattggttcgaagattgggaaggtttggattgacgccaaaagcagagcttgggcgattgtctgacagttgataactctgctggggctggggccggggacgagtagaggaaggacgatcggggtaaggagctccagatggtgggccgtcagacaaactcatcctcgagggatctggcatttggatattctctggggttgattccattgaattacctcgctgatgagcggtatatcgcgtcgacttgatgcgcgagactgcgattttctcatggtcctttctggacagagtctttgagcgcgagatactttcaatccgaccagatgcatccttgttaccactggcagcggccttggcgtaccaagagcgggcttccttaatatccacttgtacaaagataccaacctcatagaagtaacccagagcaaattcggctgtcggaagaccactctgggccgcgcgttgagcatatgtaaatgctagctcgtcgttcttctcaaaaataccctcatgtccacacaggaaccatttgctgattgccatctcggcttcgggctcaccctgacgggctgccagtgcattgtagtgcagagacagcgcggggttgaaatcacagcccagttgacaaagttcatatgcagcacccatcttgacctgggccttggcgaacccgtgatatgccgccttttcgatatttacacgtgccatgttcagatcgaggggtaggaagctttccgggacgctcacttgagggagctctcgagccaagagcatgccgtataccttttctccattagaatgatttcgaagatagaaatttttacaaaactcacgtatgcgccttgaggtgcgttctggtcgcatgactgcgccgccagccggatgtagtccaacccagtgttgaaatcctggtgctgtccatgctggcccaaaagaatcatcattcccaggcgctgaaagtatgttgttagtttttccactatgtccagtctatctgataacccacatagtatgaggcagaatccgcccgcgcaacaccccgctggtaatgtttgatcgccttctcaggctcacccgagctctcaaattgcattccgatgcggtactcggcacgcgcatatcccttctcagcggctcgggagtatgatcggaatgcctccttgcgatcgacggggcagccaaatttgccgaactcgagccacatgcccttgataaattccgctttggggtgacgctgctcggcaagaaagccgacaatgttcatcgcgtcgacccttagccgccgctccacctgtggggtctgcgggcgtggcggttgggtcagagagaggcggacatcgttctgcgcggcaacctcgacaaaggcgagggcatccaaggcccatgcgagttgcatctccgggtctgtggtcgacagcacggccatccgcgcgcgctctaggttcgcctctctctgttcatcggtaggcgggacgttaggtggtgggttccgcaaaaccgggaacggtgagaagtttgggtgatccatgctatcataggtcgcggattgcgcgtaggaattgggatcatgagcttcatcgtgtggggattggacggcggacgaggtgcgttcgggataggtgttggcgcgttggtatggcggttgttgttgcccgcggcgggggtcagcgcggtattccaactcagcgatattgtcctgcatgttctcgggcacttctggcatcactctagggtgaattagtactcgtattttcggcattctcggcatttgcaggatttgcaaagatcgcagagatgacagtgatgacagaaatcgcggaaatcgcagatagatgtgaattcaaattgatacctttgaggagatggggatatgacctctggcatgtagaagtcatcttgcccccctggataccatgttgcacctaggtgctgctgaccaccctgtggtggtctgttcattgtgaaattgttagagaattgtccgatcccccttgtcaatagtaaaggtcgaatagtgtcaagagagagggggaaatgaaaagaggagttgaaagtgatttaagggaaaaaggtagacccccacccccgccaggtcaaacggatttgaagaagagttattattagtatattgatagtagtattggtagtattaataggatatatccttctacttctagtaatataatagcgccgacctgtataagctccattatgtacatattgtattcttcagcctcatcgatggatgaggtacataactgtaccggcggacgtagggacttccatctggtggggctctcttgggggccgctttaaggcggatgtaagctgactaagtcgggttcacctccgaggttgggtaaatctcagtccggaggctgagcgctaagccacgtgatatatcagtgaggctgatgaatcaacatagccccacagtgtctattttggtaagaatgatttttgatgagcagagtaatccagagactttctcagcaggaagagcttgttaatgatgtcaagggttgaaggatggaggcttggagtttcataatgttaatgtgtctatagaatcataactatatcacatctcatgagccttatgtatcacaccaaactcatatcccattacagtgaatccgacatctcattcttgataaccacagcactcttctcacagggctttgggtattgatcggacgctgcttccaacccctcaagcatcactgggtctgtgtgatccaatttaggatcctcgaaaagagcggcgagctcaacttcggttttacctttcgtttctgggaacacgaaatatatgatcaaagtcttgaaaaattagtactcgagatatggaaataatggtagttgaaatttcactcacgccgaggacaagcattcccaggtagaaaatatagtagtaatatccaatgctctccagtgcaatgggattaacatattgattgacggtaagtgctgcctgcgagatagccacttgaatacttaaacccttggctcgaattgcaaacggcagaagctccgtcggatagcaataaagaagtgggttatttgccagattaaaggccgcatcgtagaaaaaaagaaatacaacgacggcaaacgaggctcccttggatccatgttgggcatacatggccgagcatatagtcaatgggatgttgacaaggatcatgccgatgaatgagatcagccagagagttcgtctgccgattcggtccgctagtaaagcccctgctagggagaacagcaggttccatatctgcaatccaccgttgataccggtttgctgaggtgtagaggtgataccaatgctggtcaagatggggctgaagtagtatgcgattactccctggccgttccagagtgtcaagagggcaacagtagccaccagggcaattcgtttcctgtttgccggcgactggtagagaatacgccagctactttgaccactcttttgggcggccgcttcagcctccaacaaggtatgtatctcttccatctcatgtatcacaagaggcgagtgcatgttgccgttgctatgatactttgcaagcagtcgttgggcttcttccgggcggtgttttgcacaaagccatcgcggactttcggggagaccgcaaagaacggacatcatgacgagaagtgcgggaattccttgaatgagcgacggtatacgccatgaccagctggtagtcatatatcctgtgccaaacgttgtccatgccgcgatgatggagcctacgtaccaaagtacattgaactatagaagtctcaggtcagcagaatgtataaagagcttggatatattagtaaggggaccttaccaaagaagatattgtgccacgcgtcgccggatgagccagttcgaagagcagcgacgggccagcaacacatgtgaagctaattccaatgccaatcaaaaaccgaccaccaataaacataccagctgattgtgcagctgtttgaattacagttcccgaaaacgtcaggcttgctccaacaaacatggctactcgtcgtccgaggtagtctgctgtgggcgaggcaatcagagcaccaacaaagcccccaacgaaaacaatagttgttatgagtccgattctagatgagtccggatttcccatatctggtgagagctgcatgattagcttctatctcgaagggaatgtagaaaggatctacggacctttgacccagggcttcatggactggaaacttcccaccacactttcatcataaccagtggtcatttgcgatataagaatggtagcctgccatgctagtagcttgcgcataccaagatctttccaccatttgtcaaagcgatgagtttcgatttcatgaacgggggcagtcattttgggaggatgaggttgatctctggggttaacacagaggagggcatctgggagagccaaggagcccattgaacttatattttgccatgatcaatggtatctgagagtgcaagcagatagttcattgaccgttgtagatatcgatgttggtcaactcgcgcgaaactcgcgcgagtttcttatctgcggaggcgcggcagtttccgccacccactccgagggacatttccggatacaattagggcttaaataaagacgcaacataccgaagtctgctttcaagatgctttcaaggcgcttttaccaatcattgacattcccgaccgctcgatcctgtacctagtttcccacccataccatgccccatccaacgactaatcaagtcaccgtggacgattccagagttcatggagactggcgagacgaattgttccaaaatgggtacgttgtggtgaaaaacgctatctcacctgatcgatgtgaatactacatcgacaagatgtttgagtggttggaaagtttccctttcgggtttgacaggaacgatcgctcaacttggaccgaacagcatttacccacgcatatcaagggcggaatgtatcatggataccgtatccagcatgagaagtttatatgggaggctcgaacgtaagtcttcaattccatatccgacgatacacagctaatcgatttgaccagagaggacggagtaatcgaagccttcgcaaagctatggggaacagacaagcttctggtctctttcgatggaatgaacttcactcttccatctggtactactctgccacaaactaaaccttggccacacattgatcaaagcccactgcgacagggtatgcagtgtgtccagggtgttctcaacttcgcaccaaatggtcctgaagatgggggccttctcgtcgtgaagggatctacaaagcttatgccggagtttttcaagactcactcgggtgaaattggcagagaaacatggggacctagcgattggtttggctttgacgagagtgaggtgaagtggttcgaggaaagaggctgcgagattcttaaggtgaatgctgaagccggagatcttattctttgggactctcgcactatgcacttcaattgcgtcccatcatctcagaatctacgtgccgttgtttgtgagttctcttctccgacccaagtggtctctctctgactgttcatagatgcgtgctatacaccagcatcctttgcaacgcctgatgtcttgcagaaaaagagtgaattcttcgaccagcgaattggaacggtaagttatcctttctcctgtctcttctgcataaaagggcagtttattaacttcttgaatagacacattggccccatgacaatctattcactgaaactagccacgcaaaccgcccagaagaggacgaaggggacttgaccaagcgtctttatgaggaacctgttgagacggacttggtgttaaagctggcagggaaaaagccttactagatgtttttagattacttgctcgcccatggctcatatcttccagatccagatagttacattcttcctgattcctctcaatcgatcaagtattttgacatggagccgaattttcttccatatcactagtctccttcatatgtgggtataagagaagagaaaagcgacgtaataagaattttcaaatcccctctagaatgcgaagcacccgaaaacgaacaaatccaaagcacacttagcccatcatacctatattattactcgtacaataactaatatctcgctaaatgacttccagcgaaggtctcgataaggataatctcggggtattcaaggtggggatgattagaccaatcagatcaagtcccccaaagggtcatagataaagaccgccaaggctgcatttgtgtcttccacatatcctcaatgacagcaagaaagagccaaagggcacccaatgcttgctctagttgtgctaaacgtcgggtgaggtgcgacaagcaggtcccatgtggaacttgtcttgcaagaggcctagaaactacgtgtgcaagagaagttgtcaacgtcaaaggccgagttaccaggtgagtcaagcaatccagtatataactagtgctaaaacagagacagtgcaaagcagagggtgccggttctatcttattttgaactccaacaagaaaacaatcgactaaaagctgagctattcaaatcaaaactacttacacagcggaaatcgacgtcttctacatattttagacaggaaatttccgctgaagtgctcgaaaaccagacgaatctgcaacatggaaaaagcgattatcatcagcaggtgtggaatcgaacagacatctggatgccaagcaaagactgcagtgatattttattgcatcatggctttacctggacctcgtggatccattttgctgttcatctgcagacattcgagctagagcatgagtctgcttggataaccggggtattccttgatggcgatcctctctggctagctatatattttggcttcatagcagtgagcaatatttcctgtttttcttttattgtcgaggaacctaattgatcatagatgagtctgatgtttatggatgaggatgaagctagaagagccggactacctctaggtttggctacccacgcgttttcccagtcaagttaagactcctctagtctaatgcatcctagaaaatacgtctgaacttgttcagaattggtacggcgcggcactatttttcctcaacgaggcggagtttctacgaaatccgaatttcaagacagtacagtccattgccatacttctcggattggccaaaaatgttggggactttgatcttcaaccagttcttcaggcgacaggaataaggataggccagattctaggaatggatcaggagcctcccatgatatccgacgaccctgttatgcaagagatcagtcgacgagtttggtggaccttggtcatctgtgaatggctgtccataccagcgcgtccgccttgcatccaccaagcagacttcaatgtcaggctgcctctggtcctctctgatgaagagttgacgacgagattgatcaatgagccgaatatggcaaccaaaatgccacgtccagtggattatcacaatgctatgatctttttagcaaagtcgaactatcactttcaaatccaaatgagggctatcgaaaatctggatggagataatcttctggaagaccttgttctgacaacggatgaagcgctagccaatatcatctcacagttgccatctcatcttctcgagatctccggaggactagccaaagagagagaacaatatccaccctgggtactgtggcaacaaaccacattatctctctcatttttgttctatcgaatgaaggtcaaccgagtcctacaacatcgatgggcctcctcttcggatgtccttcttgcaaggtcaaaagcaatctgcttagactcggccaacacgattgtgtcgatggtcaagcaacacaaagttgtcttggcacgccatcgtccatggtgagtctcaattcttcttctgcttttctgggtcctgttcactaaatattccacttcttcctccttatgatagggcaacaacctctgccctgttttccgctgccttgacccttgcagcagaggcaaagcgtcttgactcaaatgcagcagaggagtacattgacagagttcaaacttgtttttcattttttgagtatatcaaagatcacagcgctcttgcaacgcgagtcctaagtgaattgcgggtgttttgttttcatgattctgagtcaactagtgtctagtgattacagtgatattatggatcccattgcattgaaatttataaccagagagtgatgcagtcgattctttctagatggaagactcaactatatatatgtttagagtcatttcttatcggtacgtctttggctagtaatatcaaaggtgtaaatgctttaggtccttgggtaatgggtgatatgagcgaatgggaaatcgatccgatcagcatagctcatacgtgcctctgccagctttgataaagcagacgttgcatgtgacgagactagcgtgtcacattccatggaaccttagaaccttagaatatggaaaccttggctcggcttaaactcaatgggcgaatcagggcgttcagatgataattagtgggtcagaaaggggcatgcccagttgtacccagtactacggagtactcagtaagacaaaagcggcaaggcctgaaatccggtacctgcgtacaatacttccaaggctggtctctcagatttccaagatgtacctaacctcctccgtaccggtaattttaccttcaccgttttatttttatcttttccctttcctttggctattctcccgaggtcccttctaagttcttactggctgtcatctccaatggatttccaccatccctataagccatacgatatccaactacagtttatgcaggccttgtatgcctgcctggaagatagcaaggtcgctgtctttgaatcccccactggtaagctagacctcactgtgtttattgttgattgatctaacataatgttatgcaggcactggaaaatctttaagcttaatctgtggctctttgacttggcttcgggatcacaagcgaaagaccttccaggaaagtgttgatgcaacatgtgggtcccattgtgaaagatatgactgcatagcatctatctgacattccaggcgatgacgatgagcccgagtggatgatagaacatgccaaacgggaatctaggcgtgccattaccgaaaagagacaagaactcgaagcccgactggccaagattaggcaagaggaaggacgtttgaaacaggcccaggacagtgcagaccgaccccgtaaaaagcaggtatgcatatattcaccgattggtgcaaggtcactataccaactagaaaatagcgactggacgactcagcaccggaacttgtggacgatgacgaccaatttattctcgatgactatgatagcgacacagacaatcagaaaaggcaaaatgactctgggaattccgacggcctgtctgcaagcactctagccttgttagaacgctttcaagggaaattctcaacacaaaagaaagagaaagaggatgacggagatgatgagattaagatctttttttgctcaagaacacattctcagctgagccagtttgccggtgaattgcgacgagtcacctttccatctagtttacctagcgacctcgatccagagagcaaagatgacctttccaaactggaagagcgcgtgaaacacctgtcgctagggtccagaaagaatctgtgcatcaatcccaaagtccgggccttggagaacaacaccgcaattaacgagaagtgcttggatttacagcaagccggcgtagcagccgacaagaagtgcccctttattccctccaaggatgacgaggctctggctcttgagttcagggaccatgctttggcgactgtgaaggacatcgaagacattgcccaggttgggaaaaagctcggaatatgtccctactatgcatctcgtccagttatcaaacacagcgaggttagtttcacccgggaacagatagaacgtcgtctctaactcaaaattagatcgtcacacttccatatcccttgttgctgcaaagatcagcccgcgaagccctcaatctctccgtcaaaggtcatattgttatcatcgatgaagcccataacctcatggatgcaatagctggcattcattcggtggctgtctccctaagtcaactgcagactgcaattgggcagctgacaacatacgcccgtaagttcaagaacagactaaaagggaagaatcggaactatgttgcgcaagtcatccgcctggtgagctcaattgcggagcatatgaagtcgatcacccagcaaaaaggaccactagaaggctcggttcaagcctcagatctcatggctggaaagggagttgaccaaatcaacccttataaactctctagatatttgcaagagagcaagctcgcccggaaagttgacggctatctcgaattttcgcaacagccaaaacctggtcgatccaaagataaaacaacaatgccggttttatttcatattcaaagctttcttcttcctcttatgaacccctcggaagagggacggcctttctttttaaannnnnnnnnnnnnnnnnnnnnnnnnnnnnnnnnnnnnnnnnnnnnnnnnnnnnnnnnnnnnnnnnnnnnnnnnnnnnnnnnnnnnnnnnntcttccttttaggacccccggggaagggggacggcttttctttcagaaaagtcaagacgatgttttgttgaaatacatgcttcttgacccgacaaaccactttcgggaaattaccgaagatgctagggccgtcattttagctggtggtaccatgtctccggtgagtatagctcatatattctaacattgtagttttctaatgctctcaacagatgtcagattatgtgactcatttgttttcatatttacccccagaacgactggggacattcagctatggccacgtcattccaaaatccaatttagtcgcgcagtcattggctcaagggctgatgggaaacgaatttgattttacttatgaggcacggaattctgaaagaatggtatgtgcaaatttctgtacttggaaaaagtttcttattgacatataaactagatcaccgatcttgggcgtacgatagcaaccctctgtcaagtcattccggacggtgtcgtcgcgttttttcccagttatgactatctcagttatgttctgagtgtttggaagaagcccattcccaacgggaacggccaaagcaccctcaatctactggaacggaagaagaaggttatgtacgactcacgcgaagcagtgacaactacagatgatttactgagggagtacactgaggccgttgagtcgggatccggggctttacttctctctatcgtgggcggcaagttgtcagaaggcattaatttctccgacaagctagggcgcggcgtctttatcatcggcctaccatttcccaatatccgcagcgctgtctggcaggccaaaatccagtacctcgaggaaaagacctacaaacaggcttctgggtccgagtcggaaaggaaagcaacgggcaaggcagcgggcagggaattctacgagaattcgtgcatgcgagcagtgaaccagtgcattggtcgagccatcaggcatgtaaacgactacgctgctattatcatgattgaccgccggtatgagtcgccgcggatccagcaaaaactgcctggttggattagaggaagcttggtcccagcacctcccacgcgggcggctcaaatgactgtgcaaagactttcaaaattcttcaccgaaaaaaggcgatagtggaatatgcactgtaatcgaatcattacaaataatgatacagcatcataatcttcgcatcaaatccgtgctcgtattggagatgtgccgtaaccctacattgtaaaagaccggcagaatgagaaggcggtgtatgtaatccgtgacataagttctgacaaagccagggctagggttccacgatcacgggacaagcgaatttgttagcgcacactctaagcctggatttcaacatcctgtagacggaacgatcccttcaacgccaaacatcaacggtcttgtcgaaacacccccgccgacaagatgcctacccgtttctctaacacccggaagcagtgagtcgacaccctttcctgtgccgtctgaatcgaattcttttctcgtcgatcgcgaccagaagaaccaaattcgtcataccccagtcgcaatatcacatcaacatatcactaacctgtctttctctcgcagccgcggccatgtgtctgccggttacggtcgtgtcggcaagcaccgcaagtcccccggtggtcgcggtatggccggtggtcaacaccaccaccgtaccaacatcgacaagttccaccctggttacttcggtaaggttggtatgcgttacttccacaagaccaaccagcaattctggaagcccactatcaacgtcgataaggtacgttacatctacattttgcgagtctattcgagatgaaggagaagaagttgtggattggtctggagttggagcaccggtgcgcaaatggcgacaatatgcagaagagaaaggaggccaatcgacaactattcgaaggatttgcggaattcgattgaaatggacaattatcgctgaccgcgactttcttctacagctctggtccctcgttcccgccgagcagcgtgacgcctacctgagcggccagaagaccgatgtcgcccccgtcatcgacctcctgcccctcggctactccaaggttcttggaaagggccgtctcccccagatccccgtcgtcgtccgtgcccgctacgtcagccgtgacgccgaggagaagatcaaggccgccggtggtgttgttgagctcgtcgcataagcgttgattcgtcgagatatttctggagaaggcgggtgaataggggcaatttgaagccctagctgtgttcgttcgccagcatggaggacgatcggaactcaaaatgagatctgcccgaaccgaaactaagtcggttcaagcggtcgaaaataaaaagggtttttttgtatgcaatcagcatagcatatggcctccgaatgcccttacgatttcatcagtgtgttaaacaaataccataaggaggatttttttcaaatgtttatgatgactcccgggcagagtgttggttctgaattattgcgccacgctcatgtaggatgaccgaggctgtcttggggcatgaaaggcttcgaatcccgaacaggttcgctgttaaagctccatcgtcgtagatttgtctaccaatctgtccgattacaattgcagaacctacgccagtgacaggtcatgtctattcacatctgatctcattctatgttgtatacatcgaggtattcaccatggcctagtgctctcagatcttcgactctcgcaccgaacctcgtcgacccccctgatcgggacccacggccaacgtctcactgataaaccgaacagcctcgtcagccatcttagcagtgacctcatgggctgccgattcgtcaatgatatcttcaaagtgcaccccgccatcaccgaaccacccatcggatgagatactctgcttgagccagttgaggaacagttctccacggtgatagggaacaagcttgtccttggcgccagacagattcaaaatacgcttgccagccaaggcatgagtcaaaatcggccgcagcaccttctgctcgctctctgaaggctgaggcaacggaccttcgcgcaaaggaccagtcaatggcccgcaatccacatgcttcagcatcataccggcaggatcatatcggctgacggtctctaggaaagaagtcggcaaggcttccgagccaaggacgtcggcgccaggtggatcactcttagtccatgatggcagcttcgacagccgtgcgcggtctgccatcagattgatatagtccgggcagccgatgatgacaactccggcggtgactcgaggctcgtgcagtagacagctccatgctgcgtgtcctcccagcgagactcctagaactagattctgggtgatcttgtgctcgccgctggggaatatgtaggagggaaggtagtccatgagcactgatgtatctcttgcagtgccctctagttataattagaataccatattcttattttacacatgcattcactcacggaagatggagaacatatcctgggcatgtctggggttcccctttttccaagattcatttccgagagggtcgaccagccgggtaccatggtttctctggtcgaacgagacggcaatcaggcccttggccgtaggggtgtcctggtttctcgtgttccagtcggtaatggcggaattggcaatgctagtcatgcgctcttgggtggctaatctggggtgaagaagccagagacatgcgacctccgaggcctctttgcggagctcttccagtccgaagaccgttactgagataccagcaattgtatagaccctttcagagatggcggctgccacgctgcctacatcactcacggatttcagtggatcagtcattgttgaacagagatatgaaagatgttgaagagaggtgggctgaatagcggggagataactcgggtatactacgaaaagccgaggccgttggtttagagcgcatgtttccgagactacgaggatttgttatgttttagatgttttctagttatgttgtctattgcctatacctcgtctcctttattgcaagttgatcctctcctttttgtatatttgattccacagtgttactccaaggtccccaactaaagccacatatacggccacttttgtttgctattaaaggacaaacccctttgaattcagtcagtctaattcaatattcccattttatacgcttcatatgtcctattatataccaaatactccatatatactgttgtagagcccatgtccgttgatcataacacgcctcgacgtccaatgccccttttccagaccgcccactcttctccagtcggagagacagctgggcactccactgtaaaccaattatcgatgctcctttaaatgtcaacacacgttctttatcctggaatttcttgtttatttcttgttcttttaatatgatgactacctagtcagtttcgacagtgtatgtacgtgaacgtggtagaatccctgtgaactgcaactgataatcgccttgcattagctccaatcatgtcggcctcgtcagttcacaaggacgtggaaactggctcactgaggatcgacacaaagaagcaagagccccctttggcttcaaacgaatcaaaactggcaagcccgctgccttctcccaccgaatccaagaaaccagcatcgatcaagcaggtccaacccacgacggacggccatgaaacagatgcaacaataggcgacaaggaaaatacacatccatcatccttgaaccagggctcaccaagaggaaggccatccctgggcactcaaccgccaaaccagtcagctgaggaccaacaatggcgctatcaacgccagtcgtctaaacccagaatgtctcctccatcccgtcccccaagtgtacatttcagagatacagacaccgaggctcctgacgcgtcccattcccggccgccatcgcgacccgtctctcgaccagcctcccaacacggcgacgatgatgagcagggtcccaaaggaaaacagtcgttgttcggcaaactcaagtcactcgctaatgcacccaaccttgcaccacactcacgatctgccagcggcgcgagtacggacttccgcccaggtccaagcgatatagctaccccggggtcggaaaggggagaattccgcttcccagaggccctggaagaagagggtagcgagatcgatgccgacgcggaagagagtggtggcgagcaacccgatcctcgtgaaaagagaaaactgcaacgccggcgaaagcaacgggaggaagaggctggccccaacaccgcccctacaacacctaaaacagcgcgcagaccatcattccacttctcatcctccttcgctcctttcgagaattatcgtactaatctgttccctcgaagagcaagcactacagacttcacgcctcaacaacgcgaaggtgtttcggaagatgaaggtcgtcaaaggctcagccgacggatgaggagtcgcccatgggcaaatactcgggttggcagctataatgaccacccagataccaatccggatgaacaacgcccgagcaacttgaggcgatttaccgggcttgctggaccatctggaaacgatgaaagcctaacggcgagctggagacgccatcgagccgagcgaggcaccagtgccagtgctcaacgatggaaacaaatcaaagcaggtctgaaacttattgggcagcgacgaaagccagagaatacagtggacaataaaaaatccgcagagttacttgctgaactcgcttcggccgtgcctgctgcgcttatactggccagcgcattccaacgagatgagcacggcagtagaaagatcccgattcttttggagcaattgaaggttcgtgttacggacagccggattgattcccactccggtgatcgtcatctggtcttccgaatcgaaatggagtatggaagtggcatgactcgcatgaaatggatcatcttccgcacgctaagagactttgccaatctgcatctcaagtataagcttcatctgggaactcagaagtacattcaactacgcacgagtgagaacagcccgagtctcccccgattccctagaagtgccttcccctacatgcgaggtgtgcgaggccttgaaagtgaatttgaggatgaagatgaagagggtggttatgagactggcgccgagggaatgagtggaacggagaggcctccgatgaagaaaaagcagaatcaacaagcacaccagcgtcgagtctctggtccgcttcctcgcagaaagtccagcctcaccaatcaagaaggagacacagccgcgggaccttcgtccactaacgaaggtgtctcgggagtcaggaaagaaacataccccgagaagcagcgaaagaagcttgagctctatctgcaaaagatgattaggttcctaatctttagggctgatagtaatcgcctgtgcaaatttttggaactgtccgctctcggtgtccggctggccgcagaaggcagttaccacggcaaagaaggattcttaataatccagtcctccaagggtctcgatttccgaaaggcgctcaccccggctctagtcaagaagcgccattcgcccaaatggtttttggtcaggcacagctatgtagtctgcgtggactcccccgaggagatgaatatttatgatgtcttcttggtggatgcctggttcaaggttcagacaccgaagcttagtcttcgcaagcaaaatccaaaggatattgccaagtctgcaaagcagtctgcgagacaccctcagcaccacactctccggcttgagaactccgaacgcaagctcaaactgctggcccggaatgagcgtcaactccaacagtttgaagactcgatccgcttcatgagtgccaatactccgtggatgcagcccaaccgctttgacagtttcgcacctgtgcgacaaaactgctttgcacagtggctggttgatgcaagagatcacatgtgggttgtctcacgagcgatcaaccaggcaaaggatgtcatttatatccatgactggtggctgagtccagagctttatatgcgtcggcctgctgccatcagccagaaatggcgattggaccgtctcctgcaacagaaagctcgggagggcgtcaaagtcttcgtgatcatgtatcgtaatatcaactccgctatccccattgattcggagtattccaagttctctctccttgatctccaccccaacatcttcgttcagcgatcaccaaatcagttccgacaaaacactttcttctgggctcatcacgagaagctttgtcttattgaccacaccatcgcatttgttggaggtattgatctgtgctttgggcgatgggatactcctcaacatctgttgaccgatgacaagcctaccggctttgaaaccactgatggtcccaaagatgcagatcaatgtcaactctggccgggcaaggactactccaatcctagaattcaagatttctatgacctggataagccgtatgaggagatgtatgatcgcaatgttgtaccccggatgccgtggcatgacatttctatgcatgtcgtgggccagcctgctcgagatcttactcgtcatttcgtgcaacgctggaattacattcttcgccagcgaaagcccacgcggccgacgcccttcctcttgccgccacccgatttcaatccagcagatttggaagccttgggtcttgatggaacttgcgaagtacaaattctccgttctagcagtatgtggtcgacaggaactcccgatgtcgttgagcacagcatcatgaacgcctatgtcaagttgattgaagaatccgagcatttcgtctacatcgagaatcagttcttcatcagcacctgtgagattgagggccgaaaaatcgagaaccttattggagatgccctagttgaacgtattgtccgagctgccaaaaatgaggaagcctggcgtgccgtcattgtcatcccactgatgccaggattccagaacaccgtggacagtgaaggtggaaccagtgttcgccttatcatgcagtgtcaataccgcagtatctgccgtggagagacatccatcttcggccgtcttcgtgctcttggaattgagccagaggactatatccaattctacagtctgcgaacttggggcaagattggaccgcaaaaggcactggtgaccgagcaactctatattcacgctaaatgcatggttgttgacgaccgtgctgctatcattggatcggcaaacatcaacgaacgatccatgttaggttcgcgtgattcagaggttgcctctgtagtgcgggataccgatatgatgatgtcgagcatgaatggcaagccataccttgttggtagattcccacatactttgcgtatgcgtctgatgagagaacatctcggaattgacgtcgacgaactcatggaacatgactttgctactgaagaagagctacggaagatccaggtcgctgaggggagtgagcacccagttgacaaccaagaacgaagaaattcggcgtcctcggccgtcgaacgacaagatgagagggatatggtcgaacgtcggcatcgtgtccaggatgagtttctttctcgctccgaggaaatgtatagcttcaaccacgatgtagattgggagcagggttgtaaccctaacctcaaatcgaaccgcaagctcactgccgaccctcgcgtcactgaaaatcctgatcacaggaaagacgtggaaggggatggcgccgatcatctgtcagctgctgctcaggctggattaacagttggtcgtgattcggagatggagcccaatggaagagaagccctgctttcagccatcgctcctgaggggaagggcactgttgagcgaccgagatcatcgcagcaaaagccaccttcaacaccctccaccccgaaggaccgcagacctgggtcatcgagtgagaccaatccaatccccgagaccaatgcgactacaccgtcacaaggccatggacttaatggagcgtcgagccgcgagtccgagactagcggtaccggttcgaacacggctaaagaagaaaatgaacactccaaacaccaccatccgtctgttccggatcccaagcgtatcttcatcgacaacgactgcatgagggacccgatcatcgatggcttctacctggacacatggcaagctgtggccgagaagaacactaaaatttaccgatctgttttccgctgcatgcccgatagcgaggtgaagaactggaaggaatacaaggagtatgccacctatggcgagcgctttgcagagatgcagagccaacagggcaacaagccagcccaacctcaacaacctcaacaaaaacaaaatggctcttctccagccggtcctacggttagctctccgatgtcgatcgcttctcagatgtctttcatcactccaaaggccgaaggatcgcaggcagacccgaagagcccccagacaattaacgagaaggtcgtaactgggaatgacgctggtcgtccacagtctgagcagttagcgaagcaggagacgttatcatctatcgatgagaaggccgcactcaagacaggttcggatccgaacctgttggccagtgttccaaacgggaacgggaccagcgacgacaatagtttcgtcgtcggtgatgatatcgagaaggcacgaacaacctcgcctcatgtcgattactctgaagccgtgaacctgaatctgaactcgagccattctcggagacgtagacgcagagctacaacaattggctcaaagcgtgacccccatggcacagatgagtatttggacaagggccgtgcagaggacctccttaaccatactcaaggccatctcatcatgtggccttatgactggtatgtctcaacaacgcttccattggatctcaggatatccactgaccaattctatttacaggctcgagaaagaggagcaaggtggaaactggctctatgctttggatcagatttctcctctggagatctagtaagttgtctctccttgttgctttccgaacggaatattaacggatatatagcaactaatctctaattgcacttgacggcgtcttgttcgtgcttgtctacttggtgtctgtgttggaattcgcgagcgccgctatagcgattgatgcattttcatcttcttgggccttcttgggtctttgcctagtcatccttcggagttttcatgcatcacggcgttctctatgttacccctacctaagtagcgcaataagtaatcatcccgtttcgaatacggagatagtatattatcccgccaaggtcctgtgtggtgtgtaatagacgtactatttcaacggttactgatgaaacggcttgtactttagtagaataatgctaaacagcagaagaaaattgaattcatgattatatatctatgaagaagtaggctcttccgcaacgtagtgcaggtaagctcccagcagcttggttccctcaatgtagtttctcttgtcaagcttctcgttgacagagtgggcagcatcggtcgagcttcccatggggagaagcaaaacgttcttgccggtagcttgctcgaaggtcaatgtgacagggatactatcaatggttagctgcgggactatttcatttatgggaaaagaagaatctcaccttccaccctcgcgagtcatatcaggctcgactccgaagacctgctgaacagccttgctggcagccgagaagttccagtgcttggggctggcgacccaccacttgccgtcgtgctgcagccaaacatccaaagtgttcttggtgttcagcttggcgaactcggccttcacatagtcgatgaccagcttggtcacatcttcgctctccatattgggcacggtacgaatagagaatttaccaatcaccttggcaggaatgacggtcttagcaccgggggccgagtaagcaccctcgataccgtggatggacagagagggataacgccatctggccatcagggtacgctccttggtggggtggatacctgtctcagcacccaacgactcgtggaggttgtccatagtgtagctgatctttccatagagagtcttctcctcctcagtcaagggagccaccagatccatgatacccggaatcaagatgttaccctgggcatcaaccagcttggacagaacgttgaccagatcagtcatgggctcgtgggcagaaccgccaaagacaccgctgtgcagatcttgagcggggcccgaaatgctgatggagtagtagttgcagccacgcagaccataggtgagacagggcttctcggtgccgagccagtagttgtcagagatacaaacggcatccgtgtccttgaagtacttcttactctcgtccttgatgaagtcatccaggccctcggatccatactcctccattccctcgaagcagcacagcaagttgacggggaattcgatgccagccttgcggtgggcatcgatgacgttaagccaacccaaaacgggacccttgtcatcggtagagccacggccgtacatccgatccttctcgtcaatagtcaactcaaagggctcggtagcccagccgtcttccttcagagccggttgcacatcgtagtgtccgtagaccagaatagttcgcttgttcttatcgttaccgtatctcgcaaccaccacgggtggcagctcgaggtgctctttgccaggctgcttgcccaatggtcgttgctcaacctcggctccaagagctgtgagctcatcggcaaggaattgacccatctagaaaagattagaccctggatttggatgtctgctgggaaactcacgcggaacacatccggtcggttctcatcttgcgccgagatcgatgggatcgcaaccgccttccgtagaccttgaccaaaaatcagcgaggaccttgcgagaaaccagtattacctacgatcgatgaaatcgttggacgaggcgtcgacccttgtgactgttagttgacgtctctctttcaaagattagcatacttactgcttgaaaaagggctctagctggggagccattttggaatcactgatatagccgtagaagaagcggcgagaggagagaggcgaacgaacagctggagaaaatcgagaagaaaaaggagcgagtttgaatgaaacgcgacggaggggaaagaggggcattgccgtctttgccctttggtaaccggagagagtctagaggtgacttcttatcacgtaattttctattggccctatcacagcgatgtggtcagcggacgggttctaggcgactgagacatggactttggcatattttaggcaaaagatacagtcgagacattagaattcccccgttgatccttatttctatatagctcttgataaagtagaagatttggtatggaatacataaacaatgctacaaataagctagaatacatggatttttctttacaaagccacccccccccccgaagtatcatgctgccactatgcatctcgtccccaggcctcgcgccgcagttgacggtcctctctggccatgcggcgcttgggtccccatcgcgattgcacggcctccaagatccgggcctggatctctctcttctctgggcttgcctggcaaaccatggcaataaaaacgggcgagcattcaaaccgtttggcaagcttgtttcggctccaggtcatgggatcgttcatgcggagtttgcggatttcttcaatatccgaaggggtgaggtggtatttcctttcgggcacggacttgtagacaccgggaagatcgtcggcattgggggtcgcagtggaagagaggattgatgctttccgaacatcatcggctggcaggaatttggatggggtgtggtaggcatttggagcactcgatggcgggttgtggataatgtgatcgtgacccaggttagacgggtcaaatgaggagtctggcttcacacgtagtcgctgcttggttcgtcggtatgaagattggtttcgtcggaagcctaaagccagcgaatccgacaaggagggaataaggaatggcaatgtgagaaatggccgcttcgtcgcggcaatgaaggtcgccattgcttctggtcaatgggggggattgatcagaaactaaaatgatggaagagaaggggttagtaagtctgcatagatagtggttgcaatgattcaaccaacctaaacggaagagtgaatttgggggtggaaggactggacgtgttggcgtctcttgcgctcgaacccgaacttttcccctggtctcgtgaccctgatctgggtgtatttgcaataccgtattgaaatatacgtatgtatccggtacctgataggcctttgttgtgagtgcctttccaaagtaccgaatacaacttatctccgtccttacgtactgccccaagtaggtaataatcctccccgtttgggcccgttggggcttgtcacctggtctactccagttacgatgtctcacagatgtcatcaagacttttgctaactcccatatacccatatactctactttattgattatgtccagattttgttagttcatcttatcgaaatgtcggatatcgaaatgtcgagatttgcagcccagacagagaagccaaacgaggctgaagcgagtacacgagcgaagcccactgctctcacatgggacaatcaaagcgacaaaggttgcatatcgcctgtgaggtcattcgaaggcctgcgaacaccaaatcatgattcgcccaagtacatgcgacacccctcgtcgcctgaaagctcatcctatctgccgtctcgtatacattcccccgcctctcagatattcgaacgagacgtggaagatatagtgccagcgcaggcgtcgccttcgatccctacgcatattcgaaccgataactatattccaccggtcctagaagcatcctcggccgcgatcacagatgaccacctcgatccagattcggtcgagattgtcacacatagcctacatcagccagcaggtggtccatcgggagagcagtcaatgtcgtcttccagcattgatcatctcttgggccagctcgatggagatgaactcacgtccagttatggcgcactggacacggcggacgtacgtcggctgagctttatttcctttgccgacgttgtcaacgccgagcatgcagaaacaaatgaagctcatgctggcttaatatctcgggggcgcctagcagatttcaatcaatctccgtctccattgcgctctccatcttcttcgcgtggactcggcacttcgccgccaacaagccgtgcgacttccttcagagggcttgatatgtctcctactcggttccctacttctagtgttgcccaaagcccaatctcgtccagttttgggggcgacctcaatatagagaccatgcgacaggctttgagaaaaaccgctagtggagacctgggcgtcacaagccgggccgtgagtaccataggggatgacctgctggatcgtaccatttagcagattaaagtgcttttgtttggcgtttggacagtgaaaggctcggagcaggatctctttttttttcatggtacagtgtgataatctacggtctgctttatatgatatataccgcaatctacggatctggatattccagaacctgaaaagtccaagttcttgtgtaatgcacaggccaactttgattgaattggggtagactatacacttgcctgcccaactttttgcactgcgtccaaggcccgttgtacccgggcgcgcaggtcggctgcatcttctaatccaacactgattctcactagatccggatcgacatcgaaggttctcgcctgatgcatgttagtcatggcctggtcaacattcgcgtggtgtacttacccaatctaattcgccgtaatgggccaggaggacgtatggagagctgaaaagttagtaaaacccaagacagagggcttgcgtactcacctcaatgtaaaattggtcccaaggctgggtcccttgaaaacctcgatggtgtcaaaaaaggcaatcgcctcggctgtggtgtggaatgtcacagagaagagaccaccataaccaccattggcattgcggagactatcatatagtggtttcgaggggctgtatttcgggtagtaaacatctttcactgtgaaattgtcagtatagctctcactccaggtaaatgcatgcttacctaggggggactccttcagcatcgctgtaatgtcctcagtggtagcattgatctgttcaatgcgagcaataaaatcacggctgtttctctccaggaacacgacatcctcagcccagtagatatcttcgtagtcctggttatatgtctccttgatggccgcataatacggcgcttgagggttgagcacagcacttcctcccatgacgttgctatctccgctgaaaatcttggtcaagctgctgacaacgatgtcggccaagtgcaaaacgttgatgtttataaagttgctgatagtttcgtcgaccaccaccgcaaagccatattggtctgccaaagcgcgaatccgtttgaggtccggtgttttgagaagagggttacctggtacttcggtgaaaagcccaaggaaacgctcaccagccttcagtcgagattccagatcatccagatcttccgacgagccgtgaccatagaagacgcagcctggtccccacttttggagaatcttcaatgtatccgtgtaagggaacccgaaacaaattgagggcaattcgcctctagtagccagtaaggtctgatgagcgttgaagatagcgctcatacccgcagggtaaagatagacatcctcctcggagataccggcgactcggccttctgatgaagctgtctttaaggcttctggcagttcagcattggcagtcaagacacccgcaatacgtttgcgaacagccagcttggcctggttggcgagagaagtgctcagatttcggccaaaccgctcctcaataaactgaccatagtctcggccgccgtcttcggtgtttgattcgggaggagattctccaacagagccctttctccctttactgataccttggtatctgcggggtcccttacaaggacgctgggagactgactccgcagtcgcaaggcccttgtcttccaccaagaacccgtcctccaatgctccaaggcagaactcacctcgtcgactggagatgccattgcccgagtgttgccatacctgcttggtaatggaggcgtattcttttgggtaaatgacacacgacaaggaagatgtcactgtcgatccggattcggtatgcggggatgggacgaagttgacaatccgtactttgtatgcctgatctgcagggattttgctaagcaaaaaagagtgacagatgcgcgctgacttgactgaggcgaatagggttgcagattcgaggttggggtcaccgactcggcgaacaatctcctgcgcgagcttttgaataataggatggacgaagaatcggggataaccgcattgcatcttgtctatcacccaagcttctccttcttcgtagccgatgctttccctccatgatggaagcgatacactgacggccttgtaaatgttagaagagtcatggaggggttgcggggagttagccatacatggtcagtgtttggaggcacaggtcctcccaaagcctgcaacattttcaattgaaaatagaaaccaggtggaatttatgatctattgcagataattgctctagaataatagagagagggaaaaaaaaagactgtaaggtaaatgatgcgattcctccactcagcgacttcggcgatgctccggtacctgataaattacgagtgagtcagccgtacggtaactatttaccagatacaataccgttatcgccaaaaaaaaatctcgagggcctctactgacaactgctacgctcacgaaatgtcggaccacacatccaagcgcagaaagctcagtccttccccggagaatgctgttactagcgcttcgacgaaaaagacatcgaaagtgaccgagaagcgaaacccggctcgaggcaaagatgagcgctccgcagagcttgcaatggccagcggcttttacaagtccagtttcttcaagctgcaaatggacgagctgctggcgggattgagacctaactacagcaagcaagtctcaaaggttcaggatacactgcagcagatcaaaaccgctattgaaggcctgcccgaaaagtctccacaatctgtccccgatgccgagaaggagctacgtgcttctggtctggtggtcccatggcctgagcctcgaccgagcaaggatgtcaagtacagtatggcatacgcaaagccagcgaacatcaacgtggtaggtagctttgcgctgaagataggcgctcgcaatttggcgtcgcgcccaattgatctggcaatcactatgccaagttcgctcttccaggagaaggactatgtcaacttcagatacttccacaagcgggcctactatatcgcgtgtgtggccgctggggttcaagaaaccgcgaacaccctcgggtttgatatcaaatttggtcctcaggatggagacagtctccgacctattatcttgttggaaccacgtcaagccgaatcttccaggcctacaatccggattctgaccgcaatcgatcctacgttgttcccaatcacaaggacgctcccactcaaaagcaatatccgacaggcctccaataactcggagatcggcgaaccgacctcgtattacaatgccagcctccggtccgatgccacagtttctctctatcacaagtctgtttactcggcctccaagaagtgcgattctttcagcgacgcatgcattcttggccgcacttggctgcaacaaagaggcttccatacccccttccagaatggaggctttggtggtttcgaatggactgtactcctgtctttgctgtttgagggcggtggtccaactggacaaccggtcctgctaccatcatacagctgctatcaaattttcaaagccactattcagtttttggccggcagggatttaaccactcctctattcttcggccatgaggtcccagttccttccggagtacctgttgtctttgatggccgcagagggttgaacatactttacaaaatgacgccttggtcatacacaacactgcgtcacgaagccgccatcaccctaaaaatgctcaacgagtcacgagaggacaactttgataaggttttcattctcaaggttgacgagccagtcctcagatttgaccgcttgatctcattccccaagtcattcaatggagacacactccgcgctcttcacgaacagaatgctttgtataatgttctttcccgggctctgggagacagagtcaaacttgtctctattgtgggccacgccattgattcgtggtcggtcaaatccaagcagcccaaacggtcgagtcagggtgtgtccgtgggactgttgctgaacgccgaaaacgtcggacgaattgtcgaccacggccctgctgcagaagaaaaagaagagtctgcttccttccaggctttctggggtgaaaaatcggagcttcgacgattcaaggatggcagcatcctagagagtcttgtgtggtctgatgagtcggagacgtctatcatctatcagattttggagtatatcctccaacggcacttcaaaatcaccaccgatgaatttgcatttgttggtgatgaatatgacgagctcctcaaagagcatggcgatggcattctggcatactccagccctgctttccagtcaatcgacaatgccttcaaggatctcgagaaatccattcgcggtatggacgaggtgccactggaggtacgtcatttggccccggccagttcgcttcttcgttatacctccctcagaccaacgggacccacggacgttgttcttcagtttgaaagctcctcgcgttggcctgatgactttgctgctatccaaatgaccaaggttgcattccttttgaagattggagactctctggaatcttcaggtgcagcctcatcttgccgtgtgggcctcgaaaatgaatcgagcaaggtgatcaacaatgcttatttggaaattccccattcctctggtgtgttgttccgattgagaattcaccacgaacgtgaacaaatcctactcgagcgcaatctcaaggaccgaaatctgagtccccgggagcgagaagaggccgcctatgctctcttcgcctacaagaaaacctttgtccagactccgcgcttgacacaggcactccgaagcctctgcacgcgctttccactgttgtcgcccaccattcgtcttaccaaacaatggtttaattctcacctgttcactgcccaggtcagcgaagagttggttgaattgctggtaattcgcaccttcacccaacctaacccttgggaatgtccctcgtctgtcatgaccggattcctgagaactctccactccctctctcggtgggactggcagcaggagccgttcattgttgacctgggaggtgatctggccccacaagtgacggcaaatatccgcactcgcttcacagcttggcgcagcatcgaccctgcgatgaacactctggctcttttcgtcgcctctgacctcgacaccgaaggagtgacctggacccaatatgagatgccctccaaggttgtggctgctcgaatgtccagcctgaccaaagcagcagtaagcctgttacggagcaaaacccatgatatggaagtttccgagctttttgatacctcgcttgctccctatgactttgtcatccatcttcgcccaaagctgtttagccgttcctcgacacccaaattcaagaacttggccgaaccccgtgccggaatgatgcagaccatcaagtcgtttgtctgtgatgtgcaagcctgttacggccagagcattctgctcttccacggagacgatcgttgtgcagtgattgctggcctttggaacccgcagactctgaagtcgcgaacctggaatctgaagacggcgtactcaactgccccaggtgatactgagggtgaggttgtaatcaaccagactgctattctgaacgagatcgcgcggctgggcaatgggctcatcgaaaacattaaacttcattcagaataggtcttgtcttgattcaattggtgtacattaccctacaaaatagttcgagcatatgtagcattctaacgaattccgtttttcttcaacttatgaactcttagcctcgagtatcatagtagatgatcctctaaataccctaatactcttagtgctagacattcccagacatcatcttgatatcgatgcctaaggtgtcaacaattgataacattgtgcaaccatcagcctttcatcttctctcatcaacacaacaatggccaatataacacggggccagcgagcgctccacgctcaattaagatcgtggaatcactcttgtatccaccctcgcccccaattccagttgctgcccatccgcgcgcaatcccagctcttctcaacctcctccagtcagcaatctcgccgaccctccccgtcacctcctaccacaaccaccgtctcaactccctccaaatctgaaatcaatgccccaatcagcacccaccccgccacgctcacaaccccatcccccctaagcccctccgcaggcgcagcggacaaattaaaacgccttgtcggaatcggtcgtgcgtacctcaccttctacaaaacaggcctgaagaatgtctaccacaattaccgtgcctcgctccctctacggagaaaaataggtctacccgcctatatccctatatccccacacaacatccaccaccgtagcgcgccatcaataacagaagaatccaagctcggccgcgcgcagttccagctcgtccgccgctcagcccgcgatgtccgccgcatgatccccttcacgatgatcctgatcgtctgcggggaactcacgccgcttatcgttccgtttttcggctctgctattacgcccgcgacgtgtcgtgtgccctcgcaggtggagaaggagcgcggtgttgctacggtacgcaaactcgcggcgctagatgcgtttgttgcggagaataaggatcgctcggtgcatttgctcaaggcgggcagtgcggagcagttggctttgcttgctaagtgttttgcggatcctgtctgggtcgccggtgcgagctctgcggatgtgttgcgtgcttgtgctgtttttggtctggttaagcatcataataggactgcgggtgaggcgcttgctggtttgatctaccggcctcggctggcgaagcatgtcgagtacctggctaatgatgatgggatgattcgtggtggaggggtttcggctatgaatgctactgaggtgcggattgccgttgaggagcgtggtggtgtggacgtcacttctggtgttcaggaccggaaacgcgtggagttggagaggcgctggttggagcagtggctggctgttcgtggaaaaagtcccaaggccaagaagctgtagtttcttggactgatacactggaggtcctttctcgggggttttttgtaatatatatatccaacatttcgactcataaaagggctgtttttcgtccagctttgctatcattactagccgcaatactagctagcctcggagtgcaatctcaaactgtatataagaagacatgtacggaaggaaaatccaaatgtccaagcgctcaaaagtagcatgtgtcaatttcgacagtcaaataaatggaagggtatcaagaaaccagcctttctgatggagaaggcaatcaattgaaaaaaaaaaaccccaagtttatatactcaccatcagtccactgtaattgaagaagccgcagcctgcgcctgcgcctggctacggacttgcttcgcccaccgcagaccacagctattgcaaagatcccggtttccactcggaccacgccgccactcgggggtgttctttgtgttgcacatggcgcaaaacttctcgatcgcattagcgccttgcttgcgcttacgcttcctgcggcgagccagcagacgttgcagttcatcggccagagtgcggttctgcttctctagctcgcgcagctcgatttgccagctcgatccgcgcgtgggattgagctctgtaaagaaggttgctgggtcggtagagggagaaatgctgcggttgccactgggcagaccgttgaggccgatcaggttcgctagatcgggcatgcgttgaccaagggcaccgtactgctggggcggggtggggttatcgacggtaagtgttgtgttgcgtgcagtaccggtaagcgtagcgagactgttgtcttcggcggctgagatggcggtggcggatggaggagaggctcgagcgaatcgtatctgggcgacgaggaaggtcggttttatccccttcggtgtatcgccggtgtacaatgtggtatgtgctgaaagggcatggcctttcttatgccatattttgtgtttgaatgagggtggttcattcgtttccttgtcgctacctgtaacggtggataggccagctccttgtccaccacaggcagcctccagggcttgtgtgatcgtggcattgccaccagtctcaggctccataatctcttgtatgcctttaccaatcaaatcgtcaggcgagcggccgagcaccggcttcaccttggtagtaacgaacagaatcacaccagacaaagaaatcttggcccaaatgtcattctcggccagcgcggcggatgagcccaggcgggcaatctgatccaaggtgtagacgggtcgtgggcggccggtcatgacaaggtacctccggccctgattcggatcgatatgccaggcgccgtgactctcgaaccacatatatccttggtgcttttgtctgatacgatacacgacactcactggagcggttgtcgtgctccctcgcaagtcacgtattacaggaccaatatcactgggatggcagatggcggacagggtcttgccgatcagttcggccggatcgtactccagaatcttgtggcaagagggcgacagatacagaaattcaccgttgaatgaaagcacatggatcacatcatcggtattctcaaccagaatgcggtccaggtagtgccggttgacatcattgccagctgcacccatggcgttgaggatgttagtcacttcgtcatggccatatcgcaacacgaggtctggtcgtgaggagcgcgcatcttgtggtggaactatatactgtggcagatgatcgcgctggtagtttatggtataattaccatctatccaatgttagtgagggcactcgccacgaggaatgcaaagcataccaggattccttcccctcacagcatcgggtttttcaaccagatcgacctgaaacccgacataataccgataaacatccgagtcccactggatggggatcatcgtgatgagattcatgaagggttgtccacccttgcggtagttaattatactggcctggatctcattgcgatcgtcgatggttgaccgcagccgatagacggtctgtccatcgacaaaggtccgcttggcaccagagttgattatgccgtcgggtgcttggagaaatcgacagttccggccaacgatttcatctttagtatagccggtcagtcgttcaaaggcctctgatacatagacgattggatgatcctcgaccaagatgtcacacatcacaaaggcacatgagagatcgaccgcgccaatgttgattttagggttgggtcgcatagccacacggccctgaataaggttaatatatcgtcggatactctccatggagatggaagacttaccaacgctcccagcacgtcaaagccagtcgttgaataaatgccggtatgttcagtcttgccaatatcgggctttgctagccccggcgcgaaatcctctggttgcacggtcccacgtcagtcataccatgggacggagctaagagggagttaccagacacagacacaactcacctttagtaacaacgggtttcttgggctggatagccaccggttgcgatggacggtacggctggccaacaggcaggcggcgctctggaggttgtcgctgcgcccgctgcacctgcaccggcgcctgcgcctgtgaccagtcgctcgtgcgacccgagaagtcggagtcctcgaaatttgctgttgagtcggtgcttgtatcatatcgttccttgggcgctggccgagcgggctcggaatattggggtagcggcataggttgtgggaaaggcggatatgcagactgaaactgtgaatgatccatctgcggaggcaaccccatgatagccgggtacgtggctgggatatcgtaggaataggcattggtagcattcgtattcattggcattgaaatacccgaggtcggaatcccgtcgtatgtgagcatggcattagacctcggtccctccaggtccgacggctgtgagcgtgcgaagttctggagcgggagatccgcatcctgggatagcatggcactgaaggcataattattctgattggaaaaggttgtatatggcggattggtgggttgtgagggaacctgatgttcgtcatcatagtccaagttgaagctgttcatgttggttaaaatatctgtggcccagaccgagttccatcgccccgcaggatgacaccctgggcaaaagtgagaattgccgtcgaaatatgcttgaaaattgtttatcaaaaggaatgttcgatatattagagagatggaggaggaggagactggcgagagggtgtgtgtgtgagagagaagagaagagaacttgatatctccaatgatgtggagaagtactcgccaatcttgatatatggggatttgccatccaggatttgtaggtgttggatcttgtttatttatgtattctttctgtttatgtttctgtttctgtttctgtttctgtttctatttccctttcttgattctatatctgtatctatatatatgctaaattgtaggttgtaggttgtagaaaggtgtcctgtatgaagtgtatgccatgccatgcgcaaaccctcacaatgacaatggcaatggcaatggtagactggaagagttactatagtatatagtattagctacagtcaaagatagagagctcccagggctatattatgtagtatatatatagagctagtatatattgcccctattatataaataaacccctgtcaacattccccatttcccctcctcactctttctccaataatgtccattggccatggacaagatctcaatcaccatctgcggagatggtggatgtggtatgttgcttctcttgtctcctgggaatttcctgactccgtgattcggtgccatgtttccgggtttcgcgcgatcgagatctgatcaaatcgggatgcaggcaaatcttcaatcacgatgcggctggtccgtagtcaatgggttcacgagtaaggatatctccctggtcttggaaacctagtgctaatatttcattgctagatatgatccaacaatcggtattgcgccattcccacgcccttccaatgcccttccacttctaatcgggcccagaggattcctactccgtcactcgcaccgtcgacggtcgcccctacgtcctttccatcaccgatactgcaggccaggaggagtaccgggggctatggtctgcctcgaccctgagttcagatgccttcctcctagtttacgatatcaccaacccgtcgagtcttgaaacgctggatcatttcatggagatgattgatatggaggcggaacagcgcgtcgaggacaaccagcaactgcgccagaggttggggaatcgatatgggggtctcggccacgtaggcatgccaccgccggtcaaagtcatcgcgggcaacaaatgcgatctcaaggacggtcgcgcggtgacatcccgcgacggactggcctatgcgcgcaagcatggctgcgggtttatggagaccagcgctcgcgagacagtcaacatcgaggagacttttgcccgtatgacacacggtctgtcaaccaagaaggagagagagagagctaacggtcggatagatttaatccgtcgcgttgtcgaagcccgccgactccaatgtcaacagggtgttcttcctcccagcgaaccatcgcacacggcgctcccgaccagcacggtggacgcagttgcagagaccaaatcccgtcgaagtcgggcgtgggagtttatcaaacaccggaagacaacggaaccaaacggcgaacagggtcaggaacagagtgaaatgcaaaacggaaccgaaaaagagaaggggccgggtcaagggtgtgaaccggatgaacggtgcgctcgtcaggtgtggtgttttcgctgttgatttgaattgcggagcgaagcgaagcaattgaaacagcaacgtatccattatgtatagtacctggcatctgtgggcaatgtgtatatttctgtgtcgtagcattggatcttggatcttgtatcttgtatcttgtagaggaacatgtacataaagttcggggtgaatagggtcaaagggtcaacgggccaggtcaaggatgaatggactcggaatgcgtctccgacaatcaactacgggatatgatgctgaatagagggagctcccatggacaaattgaagtctgaatttgatagatgatttcatagggattagatttagatcgtcacatatttccaaaagcagtaagtatttagctaagctttgtgaacggaaacccagccgagaagaaaagaaataggaggaaaataggagacgccagcaatcgaaacaggatatcattctagaagcgaggcctagcccttgctcacgcccaacagggacatagttccttattgggcgatcctcggaatggtcacgtcatggactcgaagggccatcaccttgacggatgacaattggtgatagtctgagaggcctatcatgaatcatggagatgacctcaggattgaatagaatacacagtttacagtaaatggatagaatgcagtctcgaagctattcggcatgggcttgccgatttaatgtccgctgacataggcagtataaggattgcatagttatgcaaactgaggatattcaccatgtacatctgttcttctactcttctaccgatgttggagatgttgtattctatatgctttcgatattcgaattctctctattcgaattctctcgctctgaggattctaccattctcccattctctataataataatcaatatccactcctatacgtcagaaacacttcccaaatgccgagtcatcctgtatttttcccgtaacacccccgtaccgtcatttatgatcttcgatccgatcccttttttatgtccagcgagactcgagactccagtgactctaagaagaaaagccagagaatattatttttataaaaataataatccgaaacgagtagggcccctcttttcgtgattcctatatatgcacatcgacgcccatggtgacctgggatgttacttttctttaagagtctattacttcactcgagcatcttcctagatcactactctcctctctctattatttctttaaaccttcttatatccacggtccccagcatttctctctctgcatccgtctactctattggaactcaatttctcttaatctgtgaacatcattatatcattgacattttgacgtcgatcatcctccctctcgaagtatagctaaggctcggattcctgttcttctctctacactttcgaccacaaatcatggcagctcgacaatcaacacccacctccgagcactcgcattcggatagtaatgtccgtaaaagagtatgcaaagcttgcgatcggtgtcgtttaaagaaatccaaggtatgtacagctaaacgaatcaaccctcccaacatccactgaccctccggacagtgtgacggatccagtccttgttcccggtgtcgtgccgataatgccatctgcgtctttggagagcgcaagaaggcacatgacaaagtgtacccgaaggggtaagcgacatcaaacagtcctagctcgaaactcctcccactgaccagctctctccttctagttacgtcgagatgcttgaacagcaacaatcttggctggtccatggcctccaggaactctatcgacgcaacatcgaaggcgaaggctggcccggcgagcagctgaaactcgaacccaacggtcacccactcacccacgaccttctcatgcgcctcggcgccctcgacggctccaagggcgagcgcttcgaagaaaaccccgaagccttacagcaggatctgtggcacaccaacgccggcatgcaacgccaggaatcgtccgacggtggctccgatagcccccagtcaccagtgccccgttcacgcttctcctccgatgctttctcccagcaacacatgccgcccacaccgcccacatatagtcccacgacgcgtgcgcccatcaagaccgagcagccttctcaatctcagatgcccagcaccccgcaattcacgcaacctttgtccatgcaaggcgtcgtcaacccactggcgttgcaaagtccgcagcagtggcctagtagcgggttcaattctttcgacgagatggacttgatgtccacggccgattactccaatatgccctttgacgaccagcagttgtcgtcgccgatgttcaatcgccaggtgcccttgagctgtttgtcgcaagggtcatatctcgattccaaggactatgacgatttcaaccagttcctcaatccgaaccctacagagatcacctcgatctgagcccttcttctaagctattttgagctatcctgagctatcttgcgccatcttgagctcaccctgagccttatcctttcaaggatcgactattttaacgccgtatgacgtgatgcatgtatactatacatgttctgtttttctttctcttctcttctggggctattttcccccgcaagttctgttgatcggattcaggcgcaattgggatcctaatcacctctgtacagtgaaccggttttcggagatttggagttattcttcttctattctctttcttctcttttttacactttgtttcctttctttctggcgttctaaaacggggtttcaaggagtcgtccatttattgtctaattagaattcaatgaagtttttaaggtcatgtcaccgttacaccatccgaaacgggaaatgatctcattcgacttgatatccacttagcagttacccaggtaccgttccagatcgaaaagatctacagaagtagcggagggagatgccgatttgctctagccctggagccctggatccctccatccttgccttaatccctggagggtcatggagttcgaacatcaatggagcaaacggcaataactcggaccttgatttggtattttattttctttttcgtatttttgatttttaataagattattgatcttccagctgactcagcggcccattccccactttgagcgattttcggatcctttttggctgcttacgtcagccattggcctgcgagagcccgcgaaaagtcgccgaatcccgatttttgccgttccggggcaaatgctccgacgccaaaatataaaaaatcgggactttggcctttggagatgagcatgttcatccttatttgaccgtggaacttatgttataaccttctggccaagccgtctccctcgtatacaacctgttcagtcacgaagtatatttgaacggccgaacacataaggccgagttatcgccaaacctgctttcgcaagaaaatgcctctcaatcccatgccaatccaacctaataccaacctaacgccaacccaatgctaaaactctattatatcctggtacctgccaatattaatatcaaacccttggcgtgtctccttttgttcttccgttcggtgggacacgagtccggggtatagatcccttcggacgccggacctcgttctctccgaacggatgcaggctgaccctaacgccgatgtgctatgtccgttctatgcgtgatatagtgtactgatctgattggagaataccagttcgatacacgttacggagtacgtagttggcttttttacctttgcgacaactgaggttatactttaaagtcgctcgccacaggtccagcccggtttgatatggattacggaagatgtcacgagttgagctttaccctaattgggtcatggccaaaatattcaaagccctctcttttagtctaatcaacctgaatccggaccctcttagacaaataaacacctctcaaagccttggatattaacatttatgctaaaccaaaataaaggagtcatgttgtcggtgcttgatcccgcagattgcggggttgctaacgtcatgtcgcttaaaaaatttagagtacatgctatgcccttctttccccgcctatctcatccttcgagagcaaatcacataaaaggaaccgcatcatgtccgaacaagctgctttccacttcctgcctttgggcgccatcatccaaaccttctccgtcggtggtaagaacatcgttctgaatttccctacgcaggaggactatgtcaagcacaataccccacactatggtgccaccatcggccgtgttgcaaaccgtatcaaggatggtctgattcaggagctaaatggccagaaggttcaactggtgcagaacaacggccctaattccctgcatggtggggagaacaattgggctaagcgcgtctttgacggcccattcaccgtccagcgcaatggtcacgatgccgtgcacttcaagtacctctgcagagatggttcggagggattccccgggaccatcgaggtgcgcgtgtggtacatcgctagcaacgaggacgccaagaccgtgctgacggccgagtacgaggtggaatttgttggcaacgagtacgaggtggaatttgttggcaacgagtgcgaggagactgtagttaatatcaccaaccacaggtagatctagccccttcccccttcaaagctgatgacgacattcaatcttgaaattggagctattccccgctgaccaagcttccccccacctctcacagctactttaacattggcgatggccccgatattttaggcaccaccgcccagctcgctacagccgactatctgcccctcgatagcacgggcattccctcgggtgagatcgccaagttcccgcgggacgtgacagccccgttcgcgctcgccgcaaccggcgcacacttcgacgacgtctttgtgctcgagtccgatcctagcaaaatccccctggacactcgtggcttaccgctacgccgtctagcccagtttagcaatgcaagctcgggcctacatctcgaagtgtacagcaccgagcctgccttccaattctacactggcaagtacctcgatgtgccatcggtcaacggggcaccagcacatcatgaaggagctgcattctgtgtggaacctagtcggttcgtgaatgcgattaacgagcctgcgtggcggtccatggttctgctgaagaagggtcaactgtttggctgcaagactgtttacaaggcgtggaaggcctgaaggggcctaaaagaggatagcagtatggagtcctgggtacatcggtggatcttgagacatttttcagcattcaagtcaagaggagtggagatcgacctagccatgtatgtatctttgattactatacaaggaacctcggcattgtatagacattgtaatcccaaaagaattttaaaaaaataaaagaataaaaaataaaatgccgaagccgaccaagttatctccgtcgtcccgggtcctcggcagcccgtgtttccctttggaatttgagttcttcttgtatcagatgattctctgcgttcatatatgcgaacgtctctcttgtcacctaacgagatacctctatatacctaggagatatgtagtatgtgtagaggtataccaactcaaaacaattacccaattcgtgaccttcgtgacccgctctcttcgagaataatctcttctccactgtgaatgtcaagcccgtgacgatctatcttttttagtgtgccgcattcccggaatgtggcgctataagatactattagttttttttattcttattgttacggatataggatttgttttagggtttgcttatagttagctatattacgcgataatctacaacaatctcaataataggacacaaccatatggcctgttagcctgggcttactctttttgcgtagtttaatctatctgggtgtatgttgaatcactaattgactacatgtaactgactacatgtattatcgtatactcccacgtgacctcggccacaatcggactccggaccgggccaacccgagcttcttcaccccgcgcgggggaacttcgacatgcgaacacgcggatcaacacaacttctccaaataccttaatccaattcattattcaatctactccacttacaatggccctggctcacggagacctgcgccatctactacccggcaactacaagcgcttcatcacatcttggctggaagaggactgccctagtctggactatggcggttttgttgtcggcgagtcagagggcgaggcccgactactaggaaagagcaaggtaaagagacagtgtctataatagattttcctaatccccccccccccaagaaagaacattcactgatcaactcagggcatcgtcgcaggcgtaccattcttcgacgaggtattctcgcaactaggctgcacgtaagccataccccactccaatcccaccccacctctctaatccatccagaatcgaatggcacatcaaagaaggcgaagcaatcaccccaattcagcactgcgcaaccgtccgcggccccatccgcaagatcctcctcggcgagcgcgtagccctcaacattctcgcgcgttgctcaggcatcgccagcaagagcgcctccatgcttgctgcgctgcgcgcgcaaggatggcaaggtaccctggccggtacaaggaagacaacgcctgggttccggcttgttgagaaatacggaatgcttgcgggtggcgccgacccgcaccgccacgatttgagctccatgaccatgctaaaggacaaccacgtgtgggcgtgcgcgaacaaccgcgctgcagccgatggtggcgttgcggacccgtcatcgcttgagtctattgcggcggcgatcccgcgcgctgtgcaggcggccaaggcaactggtgggttctcgactaaggttgaggttgagtgtcggagtgtggaggaggctaatgcggcgattggggctggggccgatatcattatgttggataactttacgcctgagggtgtgcgggaggctgcggcgcagctgaagcgcgaatgggcttcgaagaggcctttcttgattgaggtgagtggtggattgacggaagagaatgcgccggcgtatgtatgtgccgatatcgatatcttgtctaccagctccatccaccagggtacggggattgtggatttctcgctcaaggtatcgttgcggtagaaatgtatcatcgaattttggatgcatcctaatagagcagcatatcgacgtgtataaagtacaacgaaagaagaataaaatgcacaaaaaactccgacagtccctcaacaaggtattttagccccgaataacattaaaataaaagcctttcctcatgagtgattattacaagcatatgcgataagtgtcacgtggaagagaaacacaaacagacagtgggtatatatagcataggaaaaaaaagcgcggcaaaatcaaacttcgatgtccacggtgatgccctccccttcactggagctgggagcctcatctgaacccggagggcgactgggacggttgccatctgcaatggtccctgaaggtcctcgccgcctacgttcccggttgagctgatctcgaagtttctgattctcagcatcgcgctcctcaagtcgctcgcgggcgccactgcgatctaggaggcgaccttcacgttcagatttgagttgcctctccagcccatgtagtctgtgaatccatttctcatcgctaccattccagccactttgcgagctgcgcgtgcgtggtatcattgttccaggattgttggccaacgtgctgctggaagaggaatgagagggctgccctgtaacgttgcgagtggcgcctttctcggcgcgaggtctatcagtaccagccgtagagctagaacgccctagggatcggtccgactctgctcttgacgtcaaagaaggggagcggggtcctgccatgactgcagccgcagccgcagccacagacgcaggaccctgtcctcgcgcgttggnnnnnnnnnnnnnnnnnnnnnnnnnnnnnnnnnnnnnnnnnnnnngcaaaagaggggggggggggtcctgccatgactgcagccgcagccgcagccacagacgcaggaccctgtcctcgcgagttggattgaagtaggttgagttcagcctttagcagacggttctcgccacgcaatttagacatctccggagtggaactcgattgtccgcgaccggatcgcatgtttttgaaagcctcttcgaggcgctcgagcttcttgattcgtccgttatatgacagctcaagcgtgtgataacgcttggtcaactcgtggtcgatgctcttgatgcgagacttgaaacccgccatcacagcctcgacagtcttcattgcaagcagaaggttgcggctgaagcctggccagaacagcatattaccaatgacctcctggctcgggagattgccattgataagactgttggagtgcgcccaatccggcccgcaaagcccagagattctcttccaaatgttaagaaacatgatgttcctctcgttgagctggtccttgaattgctgttccagcgatgcgtatcttttgcggtcctcggtccgcgctttttccagatctgtgatacgggaattgctttgtgtgatggtccgagatgcgtgctgatgagatttgagcgacgactcaaatgactgcttgtcggctcgacgcgcatgtctttcgcgatccaggagttctgagagttttcgtgactcaagcccatgactctcgagcagagcgtcacgatttcgaagcagagattctttctcatctagctgtgagcggacgctctctaactcaagggcggtggactcgagttccttttgcagcttcatgatgttggtgatcaagctagaccggctgccgctgagatcacctagcgtttccctcaaattgttttcgaggtccatcaaccgttctcgccaggtggaggtttcaatctcctgggctgaaaggctcttcttcagacgtcggacctcctctttggaagctgaagcttcgcggttcaattcattcatgatacgctggacatcttgcttctccttacttcctaccacctctcgctggtgacgttcatctgccagtcgctgctcgagttctctggtcttctctttttcactaaccaagctcaggtggtagtttttgaggtccgattcgagatctccgatgcggatcttatcgccgtcttgctcttcgcgaaggaaagcgatttcattttggctcgattcaatctgcaccgtcagccgctgcaccttagtgttggcctcaaataggctcttctccatagattccatctcgcgattggtctcttcaagttcctgctgcacagacttgtacgcggccaggttgttctgtgcatcttcctcgagacggatgatgccttcgctggcagaacgcatttcggcctgcaaagccctgaggttttcgtcttggtttctcaagtcctcattcatacgctggcactcaacaattttctggtcgagttcgtctccaagggtatccaactcttcctgcgcttcggcccgcaggtcctggaaagcggcatctctttcattcgccatgtttacggcctggtctcgttcttgctgtaggttttgcatctcttcttcggcttgatcaacatcagcttggtatgccttgtcaagagcctctagttctgcaatatagtcctcaagttcggctcggatggcttgattctcaagcttgagggtcgacactaagtcccggagttgtccattccgggcttcgagttcatcgtggtccatgtcgctgcgcgacatacccgttccgtcgctagcctgagacgaaggtcggacatgagtgcgcgaggcggaacggtcgaagatactgtctcccgctatggatcggccaacatgacgacgctctccgagcttcaattcttcaatctcctgataaagacgttccttttctcggttacgagatgtgagcattgaagtctgggcactgacttcttttcttagttctgcattctcctgtttaaggagccccagctctacaacaagcgtgctgttgggaacggtaggaactcggttgccatctctatcagatgtatatgaaaaagagtcgtattggccgggctttgtagcagcgtatatctcacttcgcaaacgaatcgactcatcccgaagtcttcgattttcttcctcggcttgctctcgcgctgaggtttctgcgtcaagcatatccttccacatctcctgtatatataattagctcgggtctgacttgatcgtgttcgtctcacttactcgctcttccctcgcgccggcgtcggactctcccgcacgattatcgctgagcgacctgatcatctcggccaaccgtctcttctcactttcccgtgcaatagtttctgacctcatacgctcaatctcgagttcataagtttcaacccgttcacgtaggaagacgatctcttcgtcttgggccgagtcacgatcgccatcctctgatccctcggggtcatgattgaccatggaatccttgtcggattgatgttctttcacttgcttttccaagtctcgaatcttgcgtcttaggctttgattgtcctttgagagcttgaccttatctgattttagctcaacattctccgagatcatctccttgatgccttcctcggatcgcttgttcaacgcctcattaagaaagtgaattcgcatttttaggtcaaaattctccttcgccaagcgatcaatggtgctgctctgttccttgagggtcaagttccgaccacttttcgcaaacgcaggggccgaggcacccaaacgcttctccggaagtgcttggaagtcttctcggaaccgttgtgcaaacgtggtaggaatttgaatgtccttagctcgctcggcaattgctgtatcagtaggattgctgtcttgtggcttcgctttgggtgtcatcggtgttgaggcgtcttcgtggtccacagggctgatacgggaatgtggtgagccttcctcctccagcgtatgtaggccgccgtccattggaccagacatgtttgctttgtcgagtgggttttcttcgctatacccggagattccagatgccatgctgccgagactggttgtcctagccatcttggcacggctttcagcgtgcatggttccatagttgtcagaagtcgcgcccccagtttgaagggcatagtccgcgcccagtgtggcatcgctgttggttgtttcggtgttgttactggcggctgatgagtgtgacgaacgattggttgattgtcggctagtcaggtacttgggtcggctagctctccgactaccagtaggactggtactctggtcattagataagtgcgacgcaccgggcgataggctgcgggaggtgtttcgaagcttcgagggggtaagttgcgattcgttctcggccatggaatattcaggtctgaagggacgctcatcttgggagagcgggctggtttctagtgcatttttggacaatgtggatcgagtttgtcgcagcgctgcagctaccgtaggtgacgaggagtgggagtaagacaaggtattgttcgcatgttgtcctgtagggccaggtgccgagtccaaattcgtacctggcttctccttctcggtgtgttcttcgtcttccaccgggattttatcggctggttctatgaatgagagctgtgaggagtcctgtattatgtctgcagtgccattcttcggaaccccaactaggtacgtatcatccgcgccagcagtaggaccggtcgcagccacgtcaattgttgagggttccggcagaaagctcgattcaatgtccataagtttgcgacgcatttcgtgctcttcaattagggtttggttattgtcgcgttcgtggtcgccattttcgctcgatggatggaatagactgctctcgtcgtggtcaaccgaggaaggaataaaactatgatcgttcaaatctaattgggtcgatgtcatggtaaattcagggtcttcatggtcttcatggtcttggtctccatgatccggctctgaaggagttgattgcgcgtattcagatggcgactgtgtgaccgagttcgggggaagaatccccggtgcgtcctctgccatgaagtactctgaactgaaatcattcaatgtctgatctggcgtctggaataccgacacagacgaagagcgcactgaaactggggagatgacgcccaatgtttggggatccactcgctggatctcgctacccgcctcgatcggcgaatgagcggtcattgtatttggatgtatgggaaaagttgagaaagttgagaaagtcgcgaagagatggatttgtagtgttcaaattaagtgaagatgaaggtctgacttgaattcgaacatacttgaaagtcatctggcaagagcatatggcacaggagtagacgaatagtgtggacacggccaggataatgtaatggtattgccacgcagtatatataacatattcattactgccacgcgcatatcactcgactatacaacaagcatcgagaatcgagaatcgaatcaacagaaatatacaaatcgatgacattcatatgtaaaaacgataatcatggtatccatagcatcacatcaccatcccaagcattaatcggaataatccacccataacagaacattaataggaaagaggtatactagacaaagttgtatcaaacaaaagtcacgaaaaaaaaaagagaaaaggaccaagatatcgggcccttttgaaaggtaggtatcatggagtttccccaagccagaaaaaaaagaagtatatacagccggttcattaaaaggcgaaaagagaaagagtgtgcaattacgctgcaacttccgtaggctcaatggttgcctcctcatccacttgggggtagttggttgaagcaagaattctctctttagagctgatggcgttgcgtagggagtcgatatacgtgcgaaacttaacaatctcacgtaacagatacgaagatttccgttcccagttggccatggctttagcggcgttggggtggcgtggagagaatgcaaggttcatcgcagaacgcagctcattgtggcgagagagatcatcttccacgttctgcacgtagccctgcagggccttcaactgttcctcctctgtcaggttggaggcgaccatgctttgctgtggtgggctccagtcactgatgttgacccgatccgcgggaagtcggggccgcacaccctgatgatccatggagcttcggatggagctttgaatacttggccgtgcgcctgacgaaggcggcggggatcgattttcaccgccgatcagcgcgctgttaatgacactgtcgctccatccatattcaatattgctgatgcctcctatcagtggttgcttggataatcgcgcgctccagtagttggccgtggagacaaattctcggacaatctcaggcgttccagcttggaagagatgaaccgccccagtgggcaaactcagggcccagacatgaggacgagacttggagtatccaggcgatggtaaggcactggcaatggtctggcgcagcatgaacttccaaagctcttctgcattttccgtccagttgccaccaccgactataacccctccgcgctgtttagacttttgtcgcattgacttggtggagttgttgaacgagaaaagacgcatccagccttgctgtataaccgcaaaacagtcattccagttccggtccttggcccgtttgtccaccgcgtctagatgatgcttgtgttttaggctcccctccttggcccacggggcgccggctagagctaacgtatcatcttcaagcagaggggtcgttcgctcgggctcctcgtagctgtataccgaggtagcagagtcctccctgatgatggcctgactcagagcattggcaaacccgatagattgttggtactcgccgcgagggaagtctgaaccaaaa
